United States Patent Application Publication US 2019/0183130 A1 - sequence listing, part 14

SEQ ID NO: 2 - DNA, 21303856 bp, Cryptococcus oierenis (residues 5,810,146-7,746,860 of 21,303,856)
ctcttccgcagttcagcaaggagtaccagtcctttgtctacagcaagggactcgcttcgcaacaacacttccagtacaccggcaacgcatcgaggtcgaccacggtacaagaaggatcgaccgaggacgttcagcttcaaaaggaaaggatcttgtccggtcaggcgttgacctacaccaacggtcaagtctctgctggtgaagccacctcgtcacacctcttgccctctcacatgcagaggaccgctccgcgatccgctttgacccgggctcctctcacccgacaagccacccataccgtctcctttgccgatgaggtcgcacaggccgagaccttgccctcgacacctaagggtcacccttcgcccagtcaacggctcggacgatatgtcgacatcgagaagcgcatgcagcaggtcgagacggggaaagccaagttgatgggttactttggaggaaacgggagcgagagcaagcatggcaaggtgagtttgtcgatgtcgtgccgttcgacgctctttttcgtagctgaccgatctttgcttcctcaccgcgaatctacagatctaccgatccacgcaatacttgcacgcctcggctttgacgccttcggcagccaccacccataaattccgaactagcatctctcacctcgctcggatccctcgacgattccgatccatgatcgcagcagccgtcgtctttaccctccttcttaccgtccttttgagatcgaacggaaagtcggagctggaaagggagatggcttcgaaacgttatgcgagcgggttgcaaaaggctttcgtcatcggtcagggcgaatcggacgtgagtacagccgtgtacccgctatggtcaaggaggacggtatgactgacgtagtaccctcactctggacaggtcgcccggcaccctgatttccacctcgaccccaacgagatggatcaagccaaagacgcccagttgctcgacgccatgcaggccgaggacattgccgtcgccgcgcaggacactcaattcgttgccaactccgttcacagcgaggccgagttcgtattcaagtttgagagcaacaaggaagagatggcggcattggtctcgttcttgacgtcgaccagctcgaacgcccttcctcccgtcgacccttctattcccctggatcctcgtaagtattccgggtacccccatataacgtccgtgagcagaaggcttattctcttctggtcgactcagaactcgtcttggagtttgactacaccaaggtcgagacggcccgtgacgacatggctcaactcaccgaggatgtctttgccctcttccccgtcatcatcgtcggtcgaatgcgggatcctcatcaccgggatatcttgaggactatgtcccactacacgtccaaccctcctcctctcgtcatcgaggtcgaccagcgtcaggatgccgagactttggtacctctcctcgggcgattgctcgatactcacgaacttccccagatcatcgtcatgggtgaacctgctggcggacatgccgtcatcacaaagctccaagaggagggcgagctcaaggcgcactttggtcgattgggagtcgacatgaaggacaagaagatgaagaaaaagtccaagtacatcaaggacgccgagaggagggaaaaggagaggatcctcggacccaaacctattatgaccgagggacaaaaccaagctcgatgatgagctatagaaccacctgggaactggcaggccacccctgtcccttgaacgtggacgtgatcgcattctacatattctttcttgtatatacatcagcaaatacccggagcccggtgttggacccgcggtggacatccctcggcagacggacggatacggcattcagaaaccgacgcgtatcgtggacggtcgcactgtaccatctgtacatcgaatagaaagcccgaaatgttagagatttcggcaagagcaagcatcggcaagctatataataatcattacgcagaatcttcccgattgatcatggtccgactgatcccgttttgagcttgttaagcgaagcgcgccgtcaatgaggtcagcaccgcctgggacttatcagtgttcgctccgaatttgagattcagaaggagatcaggaggtcaggactactttcgaccagtccaccattcagaagaggtgtgatcgaagcgcatcctctcgcatcctcaataatctgaagctaagcctttatgctggcgctgtgaaagatacaagctgctggcttacagaataatccattttacattcagccactgttgggcgtatgacaataccggtttataattcacgttcctcactagagggcctcgaaaggtttgtgcagggtaacgatccccctttgaggagggtatggggcatctcatgctgtatttatagcagttttatgggttgctcattgccgatgatacatattagcacgaggtcagagtcgagcatttctgagttccgtcgcgagacttcaccctgagagttcgtctctttgatcgcacgacctacatacacagagctggccgttgcagaactcatcgtgtgggttccggtcgcgagtttgtggaccttctgcctgaaactgccgctgacaacaaggtgaaaggggaatccaccgttaccacccccccttaacgaaggatccccgcataacgctaaccacataaagggtccaaaaagatacttgccaagcggctctccctggcctgtacgctgtcgctgcccaaacctccagaacaatcgcgacagagttcacgctgcacgtcgtttgactggaacgctttgggcagacgcgctttccgcgcaaggctccaatatcgctgcctttcgacttcaacaactcagccacccggtcggaaacagctctctgctccggagctcacaactgactttaacccgcctcagacattcgtctccgagttgcgatattgctccggcacccggcgcttataaatgcttccaggtcgctgaaatgtttcgccgcggcgacgggtattcgcttcggtaccaaattctcgcttcacgttggatccgaccagccttcgaattacccatgagggatcgaactcactcggggccggagggggtccagacggggtcccagacaagtggtgaagagagagagggcgggagctccgcgctactatgtactggtagccgcgatgtcggtgcaaggtggctcgcaacgatgatcctgctctacacctcttcggtgctgttgaaaatggttgcgacttccatcatataatcaataacaactcgtttttgtacacattggcttctgctcgctgcaatgatatcttcaatcccttctcaagcctccttggcatttcttcccggcgcgaaccactgacatgcgtctaggagtagctgtttcgtttgcgatgccgacgcggctgtttcacctttgtccgcgctaggagtctgctaaacggatgtcagcttggacaggctcggttccactcaccaacaccggcgtctcaccaagaagcaaaggacgggccgaggtcctccgactctcccactggcagctttgagactactggcatgaaggaagccagaagcgccaagaccaggattgtcacacgagctgagcgcctttcacaagtcaagatgagacgctcccaaggttatgttttccatctcatgaactggtataccggaacatacctgatagcccttcaactctttcagatgacgcaccaacccttcgacgtcggctgtcgtgtgccatttgcggccctttccctcgagacctcgagtccctcgaaggggattgatcatgggagcgaattgaccttcggcgtcgcatccgtcgtaacccatccgttctgtgcagcagagtatgtgagttcggtaaggccgcctactcaaaaccagtcgtaacctcacctgctcctctggcgactcgcactccacccttcaaatcgtctgcgggagcaacgtgaatcatgcagtcccatgtatcgtcaccatgcagctctgcgaccttggtagcgataccgtcgtaggtagaaggcatcacgatcgtctcgatctgcatctcaacagagtctccactagaaacaacttggagactggccgagtgcagcccgggaagggtgcttgcttcatcgaaagctgcccaatcccctgtggtctgcaagcagcaaggtaattaaggctcttgaacatggaagccgtcaggtcaagctcacatcgaaaacagtcaatatgaccttgaaccgttcatcggtgagtttctcgtcgactttgtggggcattgtgttgaagtgaggatggcgagtgccgtcgagcatttagtattcctgaatgtcgcgcaagaagtggcccttatataggaatggcggttgacaaacgtcacgtccgagaagcattcactgcgtatgtactcctttaaccgttcgacttcatgacgtagttcaagctttgcggttgaggttctaagcgtgacgtagcacgtcatcgaaggagccaatagtatagcatgttcatcacattgtcgtcaaggggccttggaatacatctgcctcgctttatcggttcgccatcgcagttctggcagcatggatcgcatactcctgtaacgaattatgggatcagctgcgatcctttgttaacatgggggaaggggacttgccttgttgatcagatgactcgtcttctcaatcaggcccaacatcttgccaaggtccccgctccaagcgttcaaaatctcgtcagggttgctccttggcgaaaagtcgacgatgccagccggtcgatcgatctttgccttcacaaccttttcagtcactaatcggcacagcgttcgttcggcctcggccgcgctgagatccaacagctctgtcagccgaggaagggtgatctgcgtgtaataactagcgaccactcggatgttctggatacgaaaaatatgaacggtcaattcgcattctcgtaggttatactgtgctccaagacttacgtgttcgatgactcgctggtgcagagcgttccatctcttggtgccatcgtctagctcaccctcagcgatggtctggctgaagacagtactctccctcagagtgggtccatagattgcctcgatcccaggccatcgcatcaattccttcgtgatgaagcatttcaacagctcgctgtgcgatgaaagatggacgacattagcactatggtcgaacgagccgtctactcgttgagttattgagccggacgcactagtggagcacacatttctgtagcttagtgttggcatacagcttgttcagcatgtcgtgctgctcattgtcgtaaggtgcaaggacaatgaacacgatgatgttctcgatagcctacgaaagacgcggatgtaaggatttctgactgctttcaggtgctgctgatcgagactaacctctttttccttctcagggtccgctttgacctcctcggtgtcccagacctcctgataagccttacaagcttctaaatacttgtcttcgtgtaaagcgagttggatcatgagatcgtagtatcgaagtttcaagtcctggaacggcaggccaggagcgaccggtcagctccgatatagaacatgccgtggccgtatcgtcgggtgcttaccgcgttctccttctccttcaagaatccacggtgaatcttacgaccaccgaccctgactcgaggccactggtctcgggtactttccaacctcatctgatcgagaatgctattaaccggacaaataagtcaggatcaaggcgtgcctgacggttcgatcgagctgtctcacaattccgtcttttcccgcttgtccatgctgctgtaagtctcgacctgggaaaccgcacagatacgtcagcttcatgacgcatacgcagggtttcgtatacgatccgtttgacccacttggacatcggtcattaaatcagcagccgcctccaagtaatccctcttggtgacggcggcctttctcttctccttctcctttgacgactcgctggaccctactttactctcttcatcttcagacggtcggagggagggaatcgacgtaggtttggctgtttgcatgaccgacacctttagctacagctaaagttcgcttccagcccgacctagactgaccaggctgtgtgttcgtctctggtgcgttcgcagccaactcctcataccacgaagccaacattttggttaacctcgcacgctgcaactcgaggtagatctacgaacgccagcgacaaggtgatcagcacacgcaacttcttccgccattactcggattccctactcaccttgccttcggtaatgtctcgcaagcagtctaccaggtccaaccagcggtctccctcactgtctgcatcgacatactttcgctccaatttccctttgccaccctgaagctcctctaggatcgacattgccgagtccaccatcctaacgacggcctctttaagctggccgtgctttctcgagtacgtggtcaaggaggtgatgagggttggaaagtgttgaggcaatgaggtcgctgatgggagagtgtagagaagagtgggtaggtgcgacaagagtcgagaggtcgagctcagatcggcagcctacgtatcggaagttgactggaattgtcagtaaatcgacctcgaccaaagtctccagacgctgccaaggctcacattccgagtctgcttttccatcgccgcgagcttgtccaaagcatcttgtacctttccatcctgctgagcggtgatgaaaagaccagcgaacaaccaacgaaaagcattatcagcaaattgaatcgtcgtagccgtctatagagtcttcgtcataccttgaccaatccttccagctccgggataagggtgtccacctctttcgtgtagtccttctcctgctttcgtgctgctttttcggccatgttgatatgctctgttcgttacggtacctcgataccagatgctaacgtccttgttgtaccgcctgttctgcgaatggtaaagcaagtaattgaccaagttcgatcagaagacgctggcgtcagcgaaacgtcagagcaggagaggttgcgatcaggtcaactgagctgagactcttagaataccgagagacctcgtatcgatattacgtcagtcttacgtagattactcatagagtagagtggcggcttccccgtcaaacgcgatactttgtcttcctataggtcggaacaaacagcttttgggctggacacgaaccatacgagcatacaaataattgaatcttagaggctgggagccaccggcaatagctcttggcttggtacaactggaccagtcacgtccactttcacgctgcggcgatggttggcggtacctatcgcgcgtcctcccataaacttgacttttcgactctcgagaacgtacatcagacaagtcatagaagagttaccagttgatcacttttcgatagtatccttgacctcttcgtcgaaaactcttcccccatctgatcatgatcaatacggaaaggttgaaagctgtcgcgagcgctgcagcggtaatgccaaagttgcggaaaccgagtccagtgatccacggcgtcacacagtaaccctacatcgcaaggaatcgtaagcttagtgttcaagttccactccaggatgggtgcatacatatccgaaagccatggacatagcaatgatcatcatgctgatgatgtatggcgctgcctgatgagtgactgcttgaggaccgtagtggttcttcggcgcgatagggtgatagcagtcgaaagcgtagttcaggatcaacaccgttgcgaaaggcccggccgcgttgaggactcccattccgagcacgaagacgatccagtgggcttcgtaatacggtcccagacccatcatcaggagaccactggcgatcaagatggcggggatccagaagagcttgaggcgcatctctggttcgagtgttccaccggctcgtttggcttggcgcatacaatagacgtcgctgatgtaccctccaaagatggccctgataaggataatactccataagaaccacgatacttgaatgcgtcacgacgcctgcgtaccctggaatggatgtgatcgatggcgaaatgtaggacaagctcactcccgacacaccgaaagctgtacaatttactcaggttcgtttgcgataggcggatgagaacgggtgaagacaactcacagtagggtggcgccgataaggtaaatgagatgagtgaaccgatggctgcgggaaagattaggactcgacattccgaattggatatggattcggattgtcccactcactattaaaccatatctggtagatgccatacatcagacctagccaccatatcatgggtaatccaagcaaagctataggctgaaagatgccccgacgcataatcccggaagcgtggggcgatagcgtgactgcttccatccaaggacgccacgatcgaaggggaacggtgctgacggggatatgtggttcaacgaccgcctcgatcgtaccgagcgtatgatccttcttatctagatcctgttcctctgctcgcacatctagcggaatcccgtgacgctccagactgccaccgtcatcgtcagcctgaagattgtcgaaggctttctgtcggtcaaagttggtctcttgcatgcagaagaagcaaaaaacggcgaccaggccactaaaacccgcgttgaggtactgtgtgtattaacatggagtccggacgcgatcaatcgggatcaacgagatgtcaggtagaatgggaagcttaccaagacagctttccaacccatgccattgaaaatgaagcctcccataagaggagccagggtcgcgccaaggtacaggaagaacacgtagagacccataggaagacctctttcgtgcgcgaaaaactggacgtcatggtcagtatcaatggaccagaaaactcgcgctgcgagagagaacttaccacgtccgagatggaaacttcggagagcgaaaagcaaggtgaaccgaaaaagccgatgaggagacgattcgcgatccattggccgtaggtggaggcgaaaggcgtccacaagttcaatccgcagctgatcaacagggatagcacgtagacaggccgtttcccgaacgccagagacgcgggctgtagaattagtggtccaaaaccgatggcaaagtaagcgtaacccgtcccctgatttaattgatcgatggtgaatcccgttgcttcgctcaagggcacgaatatggcgaataacgccgaggctgacaaggcgttggcaagcgtgtatctacataggaagggtgcggtctcgtcaagtgtctgcttcggataactccttctggtcaggtaactcacagggtaacgcaagctagcaacgtccactttctaggcatgctccagttgagcgggtcattagggtctggactcggtgtgggcacatagataatcgcgtctccctcctgaccaaaatgttcgcctagaatgcgtacagttccagcaacatcgtcttcgtaaggcgggtcgttcatggttgcgagatttacgctacaggacaagtgcctaggatgttcgagttgcggacacgctctaagcgacctggttcatagtgaaacgcaggcctatttatctcatcctcatatctcgatccgtcggcattcgccttgggtcaagctacctcgaaggccgaatctcatgcacttctacagccgacggggctatggagtgataaggtaatgaagtgccgggattcaggatctcagatcttagattatttggtgaagcggagacaggttggtcacgcgcagatccgataacgctaacaattcttccggacaagagtttatccggattcgagtaactcggaagtgctcttctcggctctcggatggcaacgtgatgtgttattgacttactctgtaccgtcgcattggggtcatctcaaagtccagcgtactcgaccatgccgaccactccgtgcatggctgttgccgcatagatatggatgtggttagaagggcttgggattcggacgacgggcagatcgaactcgagctctatctctctatacgacttatcacctgataaactagcaagtgtttaggctgatgttacgatacggacgatcatgtgcagccctgccagcctgatctccccacatccgagcgtatacgtctcggccgcaagtcatctctcgacctctcgatacataaatcgtgcgcactggcacttctaggatgatgccgcatttacggagctcaatacggcagccatgcaagcagaatgtccgtgcgcaagcgatttttcaacggccggatctttacgagccgaacgaacgatgaggaattacaccaagccatgctggtcgaggacgacaagatcgtgtgtgtcggtacgaacgaagacgtagctcaggaggtatctcaagtaggtagcgatgggacctcaactgggcctacaatcaacctgatggctcgctgccccgacagagtagctcgtcagttgaagaggttgatctcaacggatctgtcgtactgcctggtatcgtggacggccatacgcacctcgtcatgctgggcgctgcactcaacagaataaatactatagggttgacggtggaacaaatacaacaagcactctccgacagccggaagaccgaccctgacgcaaagatgttgctagggcgttccttcttattcgatgcactaggcaagcctcctaatcgaaaagacctggatgaagcggttcgcgatattccggtcttcatcgattcagcggacctccattcgtgctggttgaacacggcagcgatcgacatcctaggtatcacgaaagatacacccgatccgaaaggaggctcgtttgagaaagacgagtccggcgaattgactggactcttcttagaaacggccgtcgtcgatcacgtctggccttgtctggctgctcaactcacgaatgaaatgcgtctccagtatctcgaggacgtctttgagagctacctggcgacaggtgttaccggagccacggaaatggcactggagggacttgatctggcggccttggagaccatctacaagcgaaacggcgataaactaccgattcgagtctcggcgcactggatcgtatctcccaatgggtcagcggaagaccgagcggaaagggtcatggaggcggtccgacacaaggagaggctggcttcgtttgctccttggctccgaatagcaggtatcaaggttatcgccgacggggtcgtggattcgtgtactgcctattgttccaaggcgtaccatgatgggacattcgcgaaacccatctggccacgggacgaactattggagacggtcgctctggccgacaagcacggcctgcaagtggctgtgcatgcgatcggggacgcagccattgacatggcactggacgctttcgaaaatgccattgaagtcaacggggagagaacgaaagggacgaggttgcatcgaatcgagcatctggaggtcgttacgcgagagtcaatcatgaggttggcacgcctcgggatagttgcctctctacaaccggttcatgcggatccgatctatgtgccgaattggcgaaagatgctcgacgaagatgagcggtgcgatcgagcgttcccctggtcggaatacgtcgaagcggatgctctcatggctttcggttccgatgccccgaccgcacctcatcactgtttccctaacatttacacggccacaacaaggcaatccggactcgacgcttccctcgcaccttctaccgacgaccggataaaatccctatcgcgtttctgtatcaagctagagaaggccattcaaaactatacgctcggctccgcatacagctgccagtcaagcggatattgtggtagcctggagccaggcaagtcggcggacttctgcgttctcgaaattgacccattcgagaatgggctggaaacgctgcgggaagcgcaggagggtgtccgagaaacgtggctccgtggggagaaagtctggagtaaggcctaatttggcttcgaccacacataccttggagacttcagatgaggtatgcctgggtcataaccatgtagtagtcgttatttgtacaagaaggatccagtcgagatagacatacccccacccagcccggtcaaacgcgcggagtttgcaatatcatacatgtccgctggtctcaccgaatgactcatacttgaacagctcttacctccagtgagttgtaatagatgcctgctatgcgacgcaacggtttgatttgcggcacccatccgccctctgtagcgatccagtaataggctacgtatcatcagaacccaccgaaaggtagcatgtctcgtgaaaagagaggtgaatgaaccaattgcccagattacgcatcgtctgattcatacgactcacagacgccgtttcagtgcttgtcacggtcggatctaccttgttccaggatcttacggatgtcgtcttacagccggtgttcctgaggatgttgtcatctctcggatacggttctatgatcgtacaatatggatctgctcagctgaagtgggccggaccggataaaatttcaggcatcacgattgaaaccaagccttacatatcggacatcgatcaagtcttcgcttccagcgacttgatcatcagtcatgctggctcaggatcaatactcagcggattgagaaagggaaaacccatgatcgtcgtgccaaatacgaaattgatggacaaccatcaggtggagctggccgaagtacttcagcgtgaaggctacctggtcatggcgaccgttgagtacgtagactatcctcgatccaggctgtatgcgttgttgacccacaaaccttttcggactacagaggtcttgtggaggtcatcacttcaggtttggctagcaagcctctcacgccgttccctgcctttcagccaactcgttttcgacaactggtggacgacctcttctgagcgcgactagctgtccgatcctgtatggagccctgtgtggccaatagacggcattgaatcgagtgagtcagaaaggacgtgatgtcttcataaggtatcaatatgatgagactgaacgcctggtacagtttacagcccttgtgcgttacgacgctagagcggaactcggtccccctgcgctcagcaacgaatactgagcaatcacaggatttcgtcgaatctgttctgtacgacaacgggagcgtgatacttactatcggcagatcaggaggaacaccgacggaagtgacctttgcacgcggcgagaaagttggcaatgcttcacaaaaacgctcatctgacaaaaggccggcatcagacatgtgtccgaattcgacgatttgctcagcgcagacatgcgattgcacggtgatcgcataacctgcgagtggataacatgtccaatcctcgatacgaatttaccacagtattatgagttccatgaatctagacctctgcggtattgtatattctctgcttcacgacacgatcaacgtccgccataccagcttcgcttattcctgatgaccggctcagccataccataccctctcgcaccgccgttcaaggccgcagacatggcgtgcattgcgaatggatccgccccagcgttgtacgcatttggcataggtccaggggcatatggctgttggagcctcgcgggtccattcggggcgctcaagtatgggtcgtaagcgaagtctataaggtagatggtgtcagatccgatcgagagtggcggctcaagctcttgcgtatcggactcacatccttcggagtattgacccccgtattgcggcgtcggaagtgtctgttcacccggcgtgatcaacccgcttagagctagtgcggacgatgttttccctggcgcggaaagaatccagcagtgagcgccagtgactttccttcccaagcgagtgtactcacctcgtctgttctgcttggggggcggtacgggagcttcggatttgacttgtcgacgacgatgcttacgctcgactttcctggctcggcttgaagcaatttcatttgtggtttcgtgcgctggcgcgcttccggggtgacttctggccgtatgaacgggtcaatcagccttgtgaatgatcctgactttttgaccagactcacccgttcatcacggctgaagggttgatcatcgggttgctcatcatgcctggcatcatgggatactcaatcccggtcccgagatagcccatgccgtctgggggggatgccatgggcgaggtggcgtacatctgcatggctgcatagtactgtctccaagcctcttgacgttcccattcggtctgatcatcgtattcttcaccatcgggcatcggcgggatcaccggatcttcaaaatactcatgaggttcgacgcctctagaccggacgaaagggtcattgctttggacgagtaagcgggaattcagtgaggtgataggcggaacgggcaaagcagaaatttcggactgactctgggtatgaagatggctgtcgacgagcatggggtccggtctcctcacgaaacgctggttcgctcttgggtttcctggctttctggcggaaccgctgctcatcctcttcatactcctcctcggtgctattatggtgcgacggttgttcctctcgatcccgtctcatgttcgggtttgatctcgcctggccaggcttcgaccgctccatcgccagcggcgcttgtgaggctttcggagtgaccgactcccgctcttccactagacgcattcttcgcctttcaggtggcggcgtgcggtcgatcagctcctccgaactcgcactgaaggtcgagtatttcgaagctcccttgcgcggcgctggagtcatccgaggcttggtgaccgtgtgtccgagtcctccttctagctgctctcgctctcttgcaaacgctctgactcgcctgcctgcaggtactccatagctccgctcgtcgacgggaggtggcagatatttcctcgacttcatcactatgcccggtcggcttgggtcctcatactcggtgattcgtgacaactcttctccctgagctctcgaccgggacttgcccttctgcccagctggacttggggagtaatcgaaggtgtaaatgccttcgatgcgggggtcatcatccagcatggactgctgccaatatgcatcgtcttcggcggtaccagcccgcttagcccggatcccgttatcttcgcgagaacgtcccctctcagctcttcgcaacctcgctcgatagtcggcatcatatttggcggcttgttcttctaccgagatggtaggccgagcagctctgggcttgtagtgctcttgaccagactggagaggtcccgaggtagccgaggaacacgtaaagtccgtctgtttatcctcctcctcatagttcgcattgctgagcatcttcttcctccgtccatatccgacgccaacaccgggtatctcttccgagtcttgcaccggtcggaaggtcttgcctggtatagcagggatccggtcgtatccgttcatctgtggatcagatccagccattttcatacgcaccgtcgtctggccgacagtatcttttcctggcatcctcggtttcactccaacatgaacgctcgtcaagcctgtcattgcagagttcctgataagagctctaggtccggaagctggaggataagcgacctgtcgttcctcatctgcgggattggaggttgcctgtggaccggattcatggccttcgttggaagcatcctttgaaggattttgcctggctcgaggacctgaaggaccagacgctgactttgagggggatcccgtgccattcatgacatcgcctcgacgcataatagggaacggcggcgtcgaatcgacgtttgtgacgttctcgttgcgacccaaaggacctttcggttgaggaatcctttgaggtgttcgttgacgacttgcgtccggtgcttgtggcgactctgacgattccgtggtcactggctttcgtttgatcttatgggggttcataacgccgatatagataccgctatgcttggcacaaggcggagtgcaagtcactaccgcagcccatgcacattcaaatcagctcggcgctgacggatgattgcttcctttaaacttacctggtaggttgtccaaacttccgagcgtgtagatatggaggccgatatccaaaggttgacctggttatggcagggtatgacagggtatggcagtgcaaagatcgatacggtaccactcaagagaggttagtatctggaaatgagtttctcgcctgcctgtcggtctctccggtttgtttacatcttgaccgtttgatcgatcaaatcaaaggagccacgccgggacagatgtcctttggtgattggcatgcgatggtcttctgttctagaacgtgtctcacttccctttcgaaacaattatctgaaacgcggatcagaacacgcgtcggatgccgagggtcgtgtcgaccgagtgtggtagaaatattcctgtccaattggctacaatccctgtatacatggctgatacatagtaaacgcactgtcacacaatagcgagaccgactcaatggttcctctcgacctgtccatatttgagcggtcggacccggccccgcttggccatctcgatccgctcagcctccttttgaccatcgacaacggcaccagctcgctcgagcatatcgtacagcagaccatcctggtggtacctgaccagctcttcatatccgtcgatgggaactccaccgatggtgatgaggggatggggcgagtcgggtttacgctgagaaacgatccgggagagaatcgagtggatcctagaggcgtcttcacggtcttccaacaggagaacacgcggagcagggaggatcgagtagagagctagcatgtcataaaccggagcggtccaactgtaacatgtccgagtatcattcagtaaagctttccatagttttactatagtagcgaacagcgcaactcacgcatgaccgatatcccaaacgacgacaggatcgacgtccctcctcaactctctccagccgttctcatcctttgcgtcaaacgagagcatgaccatggggtccaggggtttcgacgtatcgactgaaggggaaatagtatgcaaggtgtcctcgagcaggtacgtctgcaaggccaaaagctcgcgttctggcgtgacgacggtctcctttaccggtcgcgagattcggggaggggctgtgagataggcttgtcatcagctcgacagttacgatgatgtcatgcaaggatccgttcggcttacctggagcgacgttgggccttgacgcagcgtagatcctactaggtgcgccaccaggcctcacaacgacctttttcccggcgacagcataagaagcggatttgcccctcatgttgctcgtctggctaccagactgcatggcgattaggtgctccctcatgaccgccggcgatagggtaccagtctcggtaagatccgtctgccccttcagctgccagatagagctgccggtcaggatatacaaaccagcgatcaagctgatcatcatcaagaccagtcgagccggtcgctgggggatactgtccatgttccacagcttcctctgggtggtctgtgtactgtgatacacaggaaggcctccagtgttggaactactccttcggtgaagtccgtccccacgaggttcagacatgccaatgagggaaaagttcatctcgaaagggttcggagagtcgttgtggtgtcgttcaggaccagcctgagccgacgaacgccttgatccgccagagtatctcgaagggtaaccgctggtagaagcgaagcctccgggacccgactcttgcctcgaaatgacattggcgttggccaagggcgaagagacctttgggctgttcgcatgatgagcacctgggctccgagcgatggggaggaggagatccctcaaggttgagagtgactcggtttcatcgtcgctgactgggtaagaaggaggcgagttgggaggcgaaaatagaatccggtgaactggagaggacatgttgtgcgattggtgaaagtcgtgaaattgtcgggagtcggatagtcgttgtaaagagagcgtgtcgagggcagtacgaagcgttttgacgtccggcgtcgagtgatcagtcttttcgctgctggcgagtagaagtcggagtgaaagctatcgaagcttttggaaaaacagcagtcgagtcttaaaatgaggcgcagccttcgcaaatagtgtatgaatccgaactgctgaaaaagctacaagtcgtcttctgagggaatgcgacagaatggcgggcctgataatatacctccatcgaacctgagtcgcggtcgaagccgactttcctgttgcagatcgaatcgaacgcgtctcgacgcgcccgtggaggtgatatggcgggcgcctctgaccaaatcctgccgcaaacgtgtcagtggcgctttttgggcgtcgaaagctcccgacgactgagacatcgatctcgtgcgaccccttccgtcgtatttcaagcaagcacctcaaccgcgagcggctcgttcgacagcccatcggaccgccacctcgacatcgtcagctatgctagttggcttgtggcgaggctctcccgtgcgatacacgccggtctttagcagaaccgagttccaaccatgtgcgttggcacctgtgttaccaaagtcagcgtatgccatacctcagaggttgcagaggaacatacctgcgatatcggattcaggattatctgcaatcacaaacatcggtcagacccgctacctggattatcgttcgccggatcagactcaccgccgatcatatacctgataatcgaagcagtagaacaagtcagcagaacggcccagggcaggtcccacatcgtcctgcgacttacacatcaagccgttcatcctcgttcggcctaccgagcgttttcagatgtcttcgcagcatcgattcagcaaagtcgtatgtcgccttgtgaggctttccgtactgcacgaacggcagatcccgccctgtggtagcctgtgttcctgcactatcagcttctcaccttagtcgtctcttgaaggccggtaagacggaccttgtagatggtctctaccgacatacggaaggccccttgaccgagccttggtagcggataatcgctgcatggtagatatcgatatgagatcgacgcgtgctggttttgcgaatcattacgcatgtgcttacgattgccattccaggtcagggttggagaatatgagaggcatatgctcttcaccttcgctgccgaccgatctcctattcttgtcgtcactgtccatctccttcttttcctgtcttcgggtaccaaatactccattttcagatgataacaattcgcagatcagggtgacgtctctgccccaatctctgctgtcgtgcatgacgaagattgccgatatgggtgtcttagaaaagtcgtttgactatgatagcaaacggaggattagctgtgatatccattatgctggcaagacttcgcgatccaacacacaatagtcatcttcctgtcctctgcggtcaagtccgttttaggccacacggactgcttccatgcgacaacatcttgagcgatccagacgttcttcaaaccatatctgcgggagtgctctgatcagaccgtctcatcggacaatcatagacgaagaaacgagactctatgcactcacgacaaggctgtacgacgaatcgcatccccctttcctcccaggcaaagtacatgcttctctgcatacggcttgaccagcaatttcaggggagtgtgtgactgaacgagttggtccgccgagagctgcatatcgataggtggacgttgacatcagcagcactcgaaaaccttcgccctgaatgtttcgctacctacctcgtgtccaagttcgcttgatagcgcttttcgcctgtcctcgtcaggaacccctcctccgttggtgatgagaacatatggaatcgctctgttcgggtatatcaccagcatcagcatctgagctcatccgaacaaagagagttagaacacagaaggacctgttccacggattgttgcccgctagcatatccaaggctctcttggcctgaggaaggacgtttggtccttgcttcagaacaccatcctgtcacccgcatccgaagtcagcttggacggcgaatggagatcgcaagaaaggcagactcacgatgtcgaaagcgaatgccaacttttcaggaaagttaccagccgacgccgacgtcgctgaatgagatgcatgtcagtcgtccgcgtcctgatgtcagcagataaatctacgaacatttgcagcggaggttgcagcggaggtagggtgcagctcggaaagcggttatacgtagcattgtcgatcagttgtagagtcctccgagttgaaggatgatgtcagagcctgaatcgttttgtgagagcggtaatgatcgactggacggttcatcagtataaaagtcgaactgactcggatcatcatcaattccctgcgatgatgacgaggcgaggctagagaaggggagatatgagttgagataccatggtttgtttactttgtcacaacctagttaccgatcgaccgatcaaggccgagcggtggggtttcaagtgctctaacatggtacgagccagaccgcacaaatgctggactccaagttctagctacgcaaacgaagtgaattattcactcaggcggtttcagattccagaacccaatacgggccgctccgggttcagatcctcggacgagccggggggatggtcctcaacgactgagaggggaaagcgaccgatgtcgggtatcctaacagatcgtctcgattacgcatctatcttttccttggtggtaggctggcaatgtcagcccgagctaccattgccagaatccctcatggtgacctccttttggtcagagagctcccgctcacattcgtgaccctggcggactcctgctttcgaccatgccaaccctggtaagaaaatcttgcagacctgccggcatcaaagggagcggtagcttgagctttgatcactgtgcaatcagccaggatttccggcgggaaggcgatcgagccaaagaaacttggcacatcaagataatctgtgaactgctggcgtcgtcactgctcgtgcttcgatatccatgacttattttactctaatacaaaggttcatgagatcgtcaagtatgccaaaagtccattcctcgttcgcttgcggcgcagcgctgcacaaatacagtaatcaatccgctcaatttcagtcctgctcgtccaatgagactatgcgtatttcttcgagatctgtaggccttctcgagcaaagatccgggccagactgccttcagcagaggcgagttgcagttcgtcggaccctccgatcgagtgcgagttgagcagtaccgtaggtatagcggagcgagatgtaaactcttgcagaacggcctggatgatcgcgccgtcttcgcggcggtcgacctggatatagtaaggcgaaggagtaatgttgtaatcgtccagtatacgtttgaggtgtcgcgagtatgggcaatatgactgcagaaacaaattcgaggtgaatacttgtgtcgctcgagcttttagctttgagaagagctcacctttgagaagatgacgagcttggtgtgatcgtctacgtctgatttccatcctcgagggaagacttccgcggcagacctctttccgatgagcctcttgaaagcgccttcgagaccgtttccatctgcgtccgtccaggccgactcgatcgcagctgtcagcgcttctccctgcgatccctcttcgatccaaccctcggggaattcggcgccgccgccgatgaaagccaccaaggcccgtaaactagcgacccggttacgctcctcgagctgacggagcgcgaggacttctgcagtttccaacccttccagacgggaatcgggtcgacctcgacttcgacgagcttgcacggacgtcaaagagctgaagacgtttttctggctgatctggcgctcaatctcctcgtactcttcttcggtcctcgacggttggacgtggaagctggaatcgtcctcctctagctcgtcgaggacgtacagaccctcttggtccttgacagcgggtttccaagcccagtcggaccctttcttcatgtcttcctcgacctgcaacagctcggcctcggcgtcgctcctgtagtcggaagcgaggcgctcttggctagcgtgtgccgacttgagccttcgacgggacaggccgttcaggtcgtgagagacgccagcgtctgccagcccatattcgcccgcgcgactatcgacgtatcgcggtccgtggcgttgaagaccgccactcatccccacgaatccggggaagagtcggacggtcgcgacgatcatcatgcagccgaaaaggattgaagtgtactttctcaacgtccttcgagcgggaacactggagacgagcgatctgccgctgatggttccggggtaacggtccgccttctccttctgcccgaacgcaggcgagtggttatgcaggcggcgcacattcgattcgtatgccgaggccgagacctgggcgttgaaaggatattcttcgaggtcctgggacaattcggtcgcccccgggaggccaaagcggaaagcttgcggtaaagaacccgtcttggttcgagtgggactagtctcctcttccgtcgctgtggaccatcgtttgctgggagaaggcgtaatctcgggggacgctggcagttcagatcgaacggttgacattgtctctggtgaaagatcgcctcgctcgaggtcgtcgaagcgcggtttcgggatagtggtgatgcggagtctggtcgggcgggcaatgttcgtaaagtcgggggcttccggttcgatcgatcgagtctggtttggagtatcgtatatagttgattcccagtcagcggacatgtcttgagcgcaagacggtctgtgtgtttgatctggtgcgcaaagccactcgtcggttcgagctcgagcaatatctggcgagcctgtcgagactcaccttggaaccggacggatcgcgatgggtaggctaagacgatgtctttgttccgacgcgccttttgattttgactttggtacgacggtgtgattcggactggaggcaccccgaatatgctcgtccaagcgaaaaaataggatgcacacaagtcgaggtgggaagcgcgatgcaagtgaatcccagatgatcgaaggagcgtgataggacttgtccaaggtgaaggctgattgcgtgtgggcagtaggtaataagttgctgctgaagtagcggctggcagacgtcaagggagtgtgatgatatggtaggtgtgatgagagacgatgggaagatgttaaccagatggaaagaagcaaatgtttctgtccgaatcgagcaattcatttctcggtgtattgtatgaaggagtaaagggggcctggaaactggacagcctgggattcggagacggaatagcgttgtgttttggagacaggagagtcaccacctgatgaacgagctacggcaagctgcattccaagcgagaagtggcctcctcggctcggtccccgggggaagcagacgaggcggaccgaggagagacgcgggtggatcgcacagtgtgggagtgaccggagtagcgtgcgtcgtttaattgaacggtgcctagaaggcagagaccgcgccgcgcccccgcgatcatgactcgtgtgatcttcttcgattcttttctacgccatctatagcccatcaggcatatacaccgagatggactaatttccctgggccgaatgtgaacctcaaccttcgcctccgaacgagttacgaatcgccagcagcacaactcgcgggacagcgaagtggatctgtgagagtcaaagaaacgcggaatgtcatgttctcaaggcttctggctacgggtatgcgttcgcccacttgcaagcccaaaaacttgacgaggcggcgagcagtagccaaataattaccctcgcttgaccagtcacgggtacctaaaggcgcgaggctttgatatatgaagctgactcttccgatgcgcctgtcgcctgtcactttccagagcgatcgttttcatcgataccgccacgtccatcagtttgttttgatcgttacgcattggctcgtgcactcccccctcgtatcggccgtatcggttttggcactttttgaagttgtgttgttcaagtcggcccgttcacttatgacgagttgggcttggcaaacacaggtggcccgcggttcctcggcgatatctccgatcaaggttgcccccggttccccctgaatattcattactgtttattattcgccgcgatacatttgggtggcagggtccgtcgcctgatgaacagctcataggcaaaagggctgcggcacctcgatcgatcgcaaaggctggctcggaggctgtaccagggaagattcttctaaaatcgatcaggatagaagatgcatagcaaacaacacgttcacaggcaggtctaaggtaaacatcctcgcctagctagaggcatcgtacgcgatgcgtggggggctgcctacaacaaggacaagccagcatacacaccagccgccatgagaccaaacccgaggacctccttgccagaggtaacatgggagtgaaggctgaacgctacgttcgtcccgttggtaccgttggtcgcattgccagcggccttgccagtagcattgacggtagcgttgttgccagtgacggggctacctccagtaacactagtctcgacagctcctgcagcggaagaggcagcggaagagacgacgctcgaggccttgtcaacaaccgagctcgcggcggacgaggccaggctttcgacggctccggcaatacctccgccggtctgtcgatcgaaagcttatcagccagccagccagccttctcgacatgattggcacgcaaaacttgaactcacggaagtggcctcggcagcggagctgctctcggcgggggcagaggcagcctagacgcgacgaggctgtcagtcaatcgccgaacccactatataagaccccggatatcattccattcgatcgactcacagaactactggatgcggggtcttgagccatggccgatccggcaaggagtatggcacatgcagagatcatgaaagtggcacgcatcttggtcaaggtttggatttcgtttccaacaggggttttcggtaataaaggtattgcttggacgggcgcagctgtcgtatcggctagaggttgcttggtgattgataaaatggaaaacagaagaatggcagactgaggaccgcacatgcagattccccttatatgcaaacgcaatgagctgcggaatattcgaaacaaggcgaaccgtccctttgatcgaaaaagggatcccctttcgctgcgaatcttgcaacacttgcttcaacgaacggtttcgatgtcaaaggacgccttcaggggtagcaaggagcccatccggaccgccttgtacttcggcgcaatcttcttgagagaggtatgatgctaatgcggactatctgctacaagggggtagtcgtaaggatctatcgtttcagaatcttgcgtctcggccgacgtcgacatccgggtcaacgtgatcctggtcaatctcgtcatgctcgctggttatgggcgacatctcgtcgagtggaggtgattgagacggcgatcgggtggccggccctagagacggcccatcagaaacactaggacctccaacgctcgcgctgaacgccattgtagatcgattggctaggtttccgaccaattcgtgcagcttgtacagttcctcgaggcgcgctggcgtattgtcctcgtcctttgccagactcgcttgtaattcagcgacctgtcgtttgaggttggtaatccgttcgtccactgtctgccgagcagcctcgactgcttctgtgttcgatccagctcgcgtaggtccagtcgcggggaacgctggcatgggcacgctgaaagagatggcgctcgtctgtctatcgttgtatgctggtaccaggtatggtgttttaggcttgacgggtgccgagaagaaggatggttccgagccggacgactctcgtgccatcggccgctggtcctttgccattttggccaatcttcgcatcgccgctgctgccgccagctgcgcaggagtctggttgtgggacgacgagtcgtcccgtgtcgtgctgaattgaggcaagagcggattcgtgtgtgtatcggctgtcaccccgctcgtgctgttcgctcttactccgccgagcggcctgaacacttgaggagcctgactggagagtggcgtgaccgccgtcataggtgttcctggaatcgagttagcaggtgcgacgcccgaaacctgtgcgggaggtgcgcctggccatcttcgctgcggtgtaatcccgaacgacgtcggccatagtccgagcgggccgttaggaggagctttggctcctggtagatccgacaatggctgagcggtcaaggttgcagctggcagcccattcgccgtcgctgtggcgcggggcaaagcaggggctcctggtacagctccaggcgccggagctgggggctgtccaccaaccgccggctgacgtgcgacagcgggtcttgcaggtgcgagaacggtgcggcgactacgaagcgggtcgtgagctttgcaacctacagcccaatgagacgagtatcatcaagctcaccaagtcggacagctttgctgtcgctctaaccaactccgcaaacaatgaaagtggaacacgtgcccgcaccccaactttttcggcgtatcattcggaccctctcgcctgcccggcaccctcccactaccagggatcatctcttcccgacagatgacgcaactttcaccgcccatgccccgaatgtcctcctcggtagcgtccgggtatttggcgtccatattcttggtggccatgcggtatttgagcaggtctcgaagtcgggccgagaacgatctgacggccgagtataacgaatgaatgtggttgagcgggatcgatccgtacagcgtgaagatggtgtagaagaatacggcgtagatggccagtcgaagtgcgtctacgtttgtaggccggccggaagagggtgtatgtgtatcagtcgaacgatgcccggtccatgcgaatacgattcctctccaaacttgaaactcaccatggacgaggtcaatgaaagagacgaccatgctctttccttcccaagctggtgcatcgtcttgaccacgagccctccagatgtcgatcacgttgacgaggtatttcgaggtaatgttgatacctctggctagagtaatggcaaactgatcactcagggtaagtagccattagtgtcaggtccacgcgagtgcgatgcgtccgataactggagcccactaacctctgctgcgaacaagatcgagctccctccgagacctcccaacgccgtacctcgcttgatggcatccttgtcgaggatcaagctggagagacagatgtacgtggagagaccgtcccagaagaggaaaaacgcgagcgaggcgatcatccgtagatggaagagcttggatgggcctggggacgggatttgttccatctgcgacagagtatcaggagatgagcacaaaaagtctggtgtggaattagtctctgtagctagaataaatactgacatagtctatccggtcccctgctatccagtggaagctcctgagaaagtacagcaccacgaacaaggcgatgaacggcgggttaaagtcgtccctagagatacttcttgtcagcgagtcatgtatttgcgggagagattcaaatctgggtaggctcaccggaaaaaagtcaatgcgagcatggattcggtgacaaagaaccatgatttatcgtagaaatgctaacaagtgatcacgagctcggaatgtcagtgggctgacggcaagagcaggccaagcgactcgacgtcacccacctcgacttcgattgtccttagagtcccgaagaatatggacttgaagaggtatccggtgagtatacagagaaatgccgcaaaattgcctaggatctatgaatcgaaatgacgagcgttccacgtcatactgcatcagctcgacgtcgggtttcccccctttgagcatgctgagcatcgacgggactcacgatagcactccccgtcgacctgtgcatttgtactgcggccgagtaaaagttttgacgttggttgtagacgtgcgaaacgagggcggctgcgatgccggtcgagacgactccataggcgaacagcttggaccgtaggatgccggacagcatggtggtcggtcggtcggtcgtgaatgagtggctactcgggatgacgttcaaaggctagattacgggggtcttgcagctggtctaatcagaacatggatgataactggtgagtactatatcttgatcgagtgtgaaagcgcccgttacaatcgcaaacaggtcatcatgagatcatttcgcaacttctactctacttctactcgctcgtcgaggcgcgcacgagaccgagattcctcatcatcgtcatcgcatgatcacgcccatggcaaaactctcaggtcaaccgatttgaccatcgagcccaacctgaccctgacttgtggatgcgaatggtgtgtgtgtatatatttcgtcatgacccggtccagcagattgccaaccggggcgtacatggtaagtatgttacgacaaggggagaggggggtaattgtgtgacgatatatgtatatgttggtacaaagacgctctcccacgtcccgtcaaactctcttttcttcttcttttttctcactgtgggcggatcatcttgcttgcccgcctcacatcatcccgcccatgccacccataccgcccatgccgcccatggggttacccatagggttacccttctcctctggggcgtcgaccacacagcactcgctggtcgtcaacaagctggccacgcccgaagcgtcggtcaaggcggtcctcacgaccttgacggggtccaagattcccttttcgatcatgtcgcagtactcgccgacgctagcgtcgtatccatagttgaactgcgaggcgtacttgtccaacaaggtcccgacgacgactgacccttcctctccggcgttttcgacgatcgtcctcgccggtcgggtgatggcggatcggatgatcgagactccgagttgttgatcaaagttggcgaccttgatatcgttgagctggagcgaggccttcagcaaggcggtacctccaccggggacgattccctcttcgacggcggccctcgtggcgttgagggcgtcgtcgtacctgtcctttttctcaccgacctcgacctcgctcgatccgccgaccttgatgacggcgacacctccagagagcttggcgagacgttcttgcaacttggtcttgtcgtattcggacgtggtgacgtcgttcatgacgccacggatctgctcgcatcgtccgttgatcatctccttggcgccctctccgttcaaaaagatcgtgtcctccttggtgatcgtcacgctaccggtcgaaccaaacaggtcgacggtggcccgctcgagcttgatgtcgagttcctcggtaaagacctgtccaccggtgaggacggcgaggtcaccgaggatggacttgcggttatcaccgaacccgggagccttgacggcacagaccgagagctgtccacggagcttgttcaagatgcacgccgcgagggcttcaccgtcgatatcctcggcgatgatcaagagtggcctcctgctctgggcggcgatctcgagcgagggcaagacgtcctgcaatgccgagatcttgccctcggacaacaagaccaaggggcgctccatctcgaccttttgagccttgacgtcggtgataaagtagggcgagatgtacccgcggtcaaacctcatgccctcggtgatctcgatctcgtcctcgatcgtccttccctccttgacggtgatgacgccctccttgccgaccttttccatggcctgggcgatgatgttaccgacgtggacgtcgccgttggcagagatggtggccacctgggcaatctcctccgaggtcgtgatgacctttttgttctgctccaggacttcgaggaccttctccacggccttttgcgcacctcgtcggaggtccatggggttgcatcctgtgagggcgggcaacgcatcgtgatcgtgagtcgacatcagcacctcgatccgtaaagaccaaaccaggatccctccaaccaacgcacctgcagcgacgttctttacaccttcagcgtagatggcccgggtgaggacggtcgcggtggtcgtaccatctccagcgacctcgttggtcttgttggcgacatcctggacgagactgcgagggcggcgagtgagagcgagagtgcgagtaagagtgggagtgatcgagtatgagtgagagtgagtatgagtatgagagtggtcaagggtcagtgaaacgagtcgccacgaggcgaaaggcaaggtccccccaaagcgggcgcagtactgaccgagctccgaggttttcaaacttgtccttgaggacgatcgatttggcgacggtgactccgtctgcgcgtcgatgtcgatgtcgatgtcgatgtcgatgtcgatgtcgatgtcggggtcggggtggattacgaagcgtcaaattccaggccaggtgtcgacgatgaagacggcgtggtagagcagcgtagatgacgatgagagtggggttgtatatggtaagggaggatggtcgcgaagagagagagaagacgaggagacacgatcagccagacgttccccttctccctcccgggggtcgaccactgactaccgccgcttactcacccttggtgatcttgggtcccccaaagctctgctcgatgatgacgttccttcccttgggaccgagcgtgacgctgaccgccttggcgaggatatctacacctttgagcatggcagctcgaccttcgttgctaaacttgacttccttgtgggccgcatatccacggacgagcgaggcggcgcggggagcacggagggcgggtcgggcggctcgcaacatggtggtcatcgggggaggacttagagtatgtaggcaagaaagggaaagagagagagagagagacgataggggcctgtttgaagaggcgagtggattatgtggtgtgtgttggttgggaggggtataagatgtcccgaggtcgatcgatggtgatttgtatggaaatttctagcaacttgctctctgtgtaccttgctgggttgactagatcgcatcgtttcgtgtggcaaagtcggaaagagagagagagagatcgacactggtatcacgtgacgtgaacccctactctacctatatacaactactggttcacctcgtatccttccttggtcataaccacctctaccactccccccctaaacactcccagatcttcgcaatcgaatcgtcaatcaagtcgttccttaaaaatggtaagcaactcgatccaaatccacgtatcacgcccgcaactcacgcatctcgacgtcgtccccccccccccttttttttccgtacgtatgtttgggaaaccgcacagtccgccactttcaagtcgatccgatccgtcgttcctttgctcgaccgagtcttggtccagcgattcaaacccgagaccgtacgtaccccatcctcctgaccttgccttactccgtctatcgccctgggacgggacgcggtacatggggaggggaggagagggagcggtttgtttacatgccatgacccaccccgcctagctctcgcgccctggaatcgactcgccttggtcttgctccttcaccctgcctccttctcccctggacatgcatgtccctctttcctttcctagttccaacttgaaacgcacatcattttgcaaccctctctccctctcgtccctcccttctcccactgcgccctggcttcttctgtcctttgcgttagaaactcgtggtatcgagatggatagtagtagtagctacccaggcagaaggacgagggcggggataaaccgtcatcaccatcacctcaccactctgacactactgttttcgatcaaaggagccgcccgcctccgttcctcgtcatcctctccggatcaaacatctactcgctactcgcactcgcactttttcctcatctcacctctcgtgcgacttgaatcgtcatgacactcgtcacgacgtttgatctcggtatgaaacggcagagtgggaacagatcgaggttttgggctacaatcaaatcaacgacagacatacgacataccacccagcagctagactctgggatccagtacaaggaacgatcatcatcccttttggattcgacacggctattgcattgaagcctcacgctcgtttcggccgatcaccgccatcacactcgtttaccacttttgccgtcgaaccgccattaccgagcatccaacccgtcgctacaagagaacctcatcaacctcgctcagcatctccaccgtcgaatctctcgtattggctgtccaaccgacccgaggtcgactcgtctcaatagcacaatactctggccgttcaacttacttgcagatcgttcgggcctgaccaaacatccgtcacaacgatgcacatcgtccatcgaatcatcctctccactctccacctatcgactttcgctagagccctgacctataccctcggtcaagcgagtcaatgcggggatctccaggtgacatggagtgatgctagtgggggtgatttgaacctcctcgtcttgcccgtgagttctagcctctccgcatgatccccggctccgggcgtctaaactgagagaccctaaatatatgacgcagacggatcatggcacgggtaacgtcgtacagacgttcaagatcccctcgacggcttcttcgccatatacgttgaagaactttctactaccgtccggggctaaatatgtggcttcgttatgggacgatggaggttactcggcgacgaaaccgacagagatcatgagcaagtcccgtctttcgacacgacgtcgatttcgagcttgtactgatcaactgtcggccccttgatcatgtcgctttcgtagctacgggaccgggctcgagctcggcctgcctgattcccgcttccaacccttacgtcgatttcttcttcgactttgacacctttaccccgacccaatgttccaccctcaagatcacctgggagtccaactataccgccccgctcgaggtcgtcagcgtgacacctggcggtcagatgcgtagtctctaccagacgcaggatcagggtcaagcggggtacgattggaaggtggacatacccgccggagaagaattcgccatcgccatctttgacgccggtccgttggggaatggcgggagttccgagttcatcacggtccgcgatagtggggattccgggtgcctgcagagggaatcgacgacgacggtgatcaagagtagtgcaggtgggacggtgttgcagacgatcactcaggtcatcacacagccagctactgccgaaccagccgaggggaacaaaggcgcagacaagtgagtcgctagaggtgcagatccatatcgatcaatgcacatggaactgatgcgggagtcgggtcgattgatagatctggcgtccccatcggagcgctcgtaggtgggatcatcgggggcctggccgccatcgcgctgctcgtgttcctcctcctctggcgacatcgacggagacaggtccgggatccggatcatccccgtcagtccacttggaaatcgtacccgggcacgaccgtattcctcggaggtatcccagggtatgcggatagggagcaacgtggccattcgggtcatcacgggaggtctagtccagagggttactcgaaccaacctttcctctcgtccgacggggagccgagcttgaacaagctcacccctaccggtcagagtcaggtgacggacgattacggattcgaggcgagagacaacgatccggatttggtgcaggacatcgaactttcgccctacttgatgcacgactcgggcttggattcgccgacgagtcccacacctatgcggggcctcggagcaaccactcaatcgtcccggtacagcctccacgatcgctcggccagcccgagggaatctcatcggctagacgtgcggacgctggattcacaaaacggggaggagactcttgcgccgacccttccgtctcctgtcgcaggcgcggcgagatcgtctccattgcgtctagtcgattccgatgatcaagcggaaccatcctcgtatccctcccgaggtgtgagcgagaaggccagacgacactcccaattccttcgcggtgcagaacgaccgccgacgatcgtacaacatagtgatgccgggattgtcgaggagaccgaggccaccagtgcgggacccgagggaatcatgtgggtcaccatttgttgctgtagtctcgcctgggatatggggctgaccaagtgttgtcgtttacctcagtcaccttccacctgcatatcaagaggtggctcagacgccagcacaatcacgaccgacatgatcagaggcaaaccgattgagagtcttttcttgttgtcagatttgaggctcgctatatgtatccatctcaccaccatgaagccgaaagaggccattacgacatgacagcgtctgccgacctggtcaggttcaattgaatcctttatgtcctgctagcatcccttagctggcgtttaaagctgttcccaaagcgtcagatagattgatatcggagaatcacgtcaaagttcagctcgaacttgatcgcgcccttgtgctcccattgatcataggcaaacagcgcgtacgagctggtatctgtgcatgagatatctagatgcaaaacattcatatggatacaacctgtgctaccgtcatcatctctaccatggattattgagagcccaatcgtccttgggtttgcgatctgggtacgtcgaccatcctgtagtcgcatctttgctttccctcccgaacccaccaatatcacctccctcgtcatcgtcatcatcaacgccgttgacatcagcatcgaaatgagatggcacgtccaggtctttgctgaaaatattggttgctgattgtaaaacgtgtgagggaaatcctctggcggctcttgtcgatgccgtttgcgatgcgaatgaagccttgggtgctgctgaagaagcccactcgttggaaaagtcgggcgcctttgcccgggcatccgcctgcgcagacccgatctcttcatccgaggcggacgcggcggaccgggaagctggatacgccgaggtcagaggagaagcagatcgggtgtcgagttctgacacgggatccgcgtcctgatcgaggggaggagcagattccgctctctcaagggggacccgctctcggaggtgccgcacactgtcgggcacgacggtagacggctggggcaacttgacgacctccggatcgacattctttcccaaaacgtccgaaatcttcttaaagtcgaagccagcggttgctggcaggtctgctgtagagttagttgccgacgacggtgctgtgatgggttgtttaggaacggccagtcgagaattgggtgcatccacgggtggagttgcgattccgcccttcccgatatcgccatcatcgtcgccctcgtcatattcttcagcctttcctgcattgttgggatgtgagaatgaaggcgggggattgacttttggtgtggactggcccgaagtagagctttgtttgcgggggaagatcccccacagttttgacttggccttgcgttgctcctcttcttgctcgttgacgaccgttctcttttgaatgctcagatcgagttcagggtcctgaacagatacccgaatgtcagtatattgtatttgatttgcatacagtcgggtgactcacatcaggctcgtcgaaccagtccgcggtaatcggcaggccaacgacttcgaggagggctggcatgcatggtcgatagctcatgtgacccgcgatccggtccgtcacgtcgatgttttccaatccagggacgctttctatggctctaagcccagcgacagtactgaggcccccactggtagctcggaatagataacccaagacccaatcattggtggcgtacgcgttgacgaagcggcccgatactaccgaacgggcgttcatccaagtagctttgggagcagttactgtggctccgaaaaggtagacatcttgcacaataccgaatgccttttgcttggcgagttcgtctagcgcgtaaaagatcactcgagctcccaagctaaaaccgatgagcgatataggacgcacgccggcgtggcgctgaatcaagacgtcagccaggacgagacccgcggcgtacgctctatcgagcgcattcgaccaagggttgtcgatcaggtatccgagctttgtgagcactgtgtcgtaaggatgatcagcatcaaggtgatgtatggacagttggaaagggtcaatgactcaccaatgggcagcgaaagaccgctcatgagacctcccatcatcatggtcgtacccagcacggacgtgccgacggaactcaggacctcgctggtgagaattttcaaagcgtttcccaactcgttcatcatttcaggctcccaatgtaccgagaacacgtcgccgacgatcgaatcgagcgtcgagaacggcaagcggacgtcatctcctgcgctggccatgtaactgagaggaaagtcgtttctatcagaactttccaggccttcttgcaagggggaccaaacttacccaggcactgtgataaaacaattgacccgcttgttgttgtggatgggacggaactcgaacgttcgcacgttcttggtccgtcgcagcattcccttgcccgcgatagctcctccgctcaagacacctccgcttgtgatgatggctgcgccaccagctcctcccagaaaggctcctgtacccgaaataccgataccggcaaaggcggcaccgagtccagctccgatgacaggagccagtaatccggccgacagcccgatgaccaggccccctccaagagtggcaagacccatcatggcgattcgccttttcttggactgcttggctctcccttcgataatctgcccgtgcttttgactctcgataccttcctggatttccaacgcgtccgtgacacgcttttcgaaccgtgtcacatctagccatgtcagacccaacttggctgccactctttcgagaaagaccctcgatcgcgcatcatacaccgagtcgccgatcaactgcaagaacatgtcacagagctgagacgaagcgttgtcaacaacttgtgtcgatatggatagctcggcagacagaactcactacggtccacctgatatcgagcgtgacattttcatccgtcttggagagggcggtcgatactcctggcagtgcttcgctctgcttgggtccttcttcccgtatccctctctgcacaacctcggcagcgttggtgggctttgcggtactctctggaggcatcggcgcggccctctcttccgctattgatttttgctcttgctcggatcgcgcagatggcggttcgtccggtccggatttgtctagcacgaggtcctctagagtgttcgctatgtcgccctcctcgatgggcggataagctggctctgatctttcccctatcgtcgtgacatcttttttaggttgcgacggagtgccacttatatcaccgtcatcgagatcgctatcatcgccgaacgggttgacattcttctttttcgacatccgtctgttcggctttggcgcttcgtatggagggggcggagcctcttcagcttcttccgactctccgaatggatctgtgctggacaaggccaatggagattttgctaaagatggatcttggtccggtaatgaagcatcttgcgactgccgtggcgttgcgatcttgtcctgaacgacctcctcgtcgctctctggttcctcgttgatcgttctcgctgctgcagggtcgtactcgggattcttcaccgtatgtgtcgtcatgagagcaggaacgaggtccgcggccagtacgccatgctctgccaatgattcgatcatgcgttgctctgcgacgttcagacttagctgaccggttcgacgggtcgcaaacgagatgctcccccctgcttaccgtccgcgttcagattcatgtgttgatacagcctggccatgatcttgagcatccacagtcttccacttcccacgactccggtctcttcgtctttgcctttcttgacgggcggcaaccctcttcccatgtccaggatcatctctcttgcgacgagtgcggaaagaccgacataggcgatcctctggccttcggtcaacatttcctttgtagcctgcatctgactcaacggcgtcatggccttgtcatcatcgaacaggaactttgtcctcatgtgtacttcctcggattcttcgtcctcgaagagacgtagcctggtataatctgattcatcctggtcgaccttgtctcgccagttgtgttcggtcgtcacgtcgggagccaactcgagggcggcaccggtagcgttcccggggccttccttgtcatcctcgtctatgcgtacaggaggtaggtactttcgtttcctcgggtcgtcctcatcgtcgaacccagaaggggcgttgtccgtcgaccggacgacgggcatgtctggtatcggtcgatcagctccgacgtggggtctgaccgagatgggttcgacgtcgactcaccttgccagccctcatcatcatcgtctatatcaaagacttgatgtctcctgggtacggcggacgtcgaaacggatcgctgcggtgccgggatcatggtcgtccgagcgaatcgcagctaggctacaacgagctcggtctggttgcgcggcgaggaactatccagtctgtggtgtcgggatgagctatgtcatgtgtgattcaatttatcgtagaagcggctcgtgtatgctatgcctgttgccctgaagcctgtgacggctagctgctagattctggtatggttcataagccagtgacaatcaagtcgagataacaaggtcacgaaatagctcgacccatcaaacaacagtctggtcgcaaccaccctaggaagcgcggatgcaaattgacaaatcaaagctgatcgatatggttgcatattctacgacgatccatgtctaaatctctatagtctttgaagcgaccagtcagatttgacctgcaagatcctcatggcagggcccgtccctatgccactgtgtggcgatgatctgataataccatgcgcgacatctcctatgctgcaactctacgatgacaactggtttcatctcaatttataaacgggtgaaccggaacctgcgcgactcgaatgtctaaatcgaacgggtcgagtcgtccccatctaaacattctaccagagtacctgcgcccgcaagagatgcatggccatctccttgtccgacctgaaatccatcatgttcagcgacctggcgagtcgatgcgcttcgctcgtcgtctgcagcgtgatgatataggtcgatcgacggcccgcgatcgtcctatcaaagggagcaatcacacgacgaatcagcttacgcccgacgagtggtgccgattgtgcccgggcacaccgacacaccccagaggaacactcacttgggaacgtgaaagacggcgtcctcttcggccaacttgtaccccttcaagatcctggaccaggtcttttccttgatcacgtccggcatcccccacatgacgacctgtctaccgctcatcggctggtccgctcgcatacgggccttgtcgtccgtcccaaaaggtccgatccgggcctctcgaaatgccttcacgtactccgaagcggcttcgattcgctcctcgtcgttcatcggtcgggctttggtggactgtttggagttgaccgtgctcaggggtttgcccgtcgtcttgtcgacacggggaaagatgttttcctgcagataactccgcatcaacgagcgcgagtaccagatggtcgggtcgacccgctctgtgcccggggtttttatatcgcgacgtttcgaggcggctacgaggttggcacggtagatccggttgggctcgctcttgatcgagaggaatgaagcgaggtgcgaggtggccaggttgcgtgcggtctcggcggcagctgggttggggaaagtgacgaggaacgaggtggtcgatggtggggcatgtgccgagttcgagggtgacatgggttggagctcggccgtaactgtgagaagacgacaaggatgtgacctgcgatgagtcgcgagtcggaagtcgatgttacatgtagccgttggacttgccattcgacactgagacgtctccccgtttaaaggctcctatacgtttcagcgctcgatggagatcctgcggggtatacgtgcgagggatgccttcgaatttgacagccatcttgccgtctataaaaggggggtggacattcaaagtcagcttgcgggttgcgtcggtagtcgtccttccatactgaccttttgctttatcggccgatcgggtgctagcccagcgtcggccgaccaccgatagcgaaggcgttgacgtacatagtacgtgtttcgatgaagaggctatgcaggacatgatgagaggaacagctacagaggtcgattggatgtggtgaagaacgatcgacttttcgagtttatgaattgtgtgatttcgaaattcaggttcgctctttggctggagagagggagattcaaacgacaagagagagagagagggagagaggtgagactcgtcgccgatccaaggcagagagggggggtcagtttggttccgaattcgcttccgtaatcgaaatatacatccgacaattccccggttactcgctcatctcggtcaaacgcgaactctcggtcagtgcaacttcgagcaacttcaaggtcgactctttcactcggttgaccatctcttcatgccccgactacccgtcttctgattccccgttctatagcccacggcaatcatgtcatccatccttcagcaccttcatgagcacgaagccaatgaacccgactcggccgatagaccgtcgatatacgaactcttggcgaccgatgaacttcgggatctcgtccagcctgcctttcgttatgtcctcgccgtcagtacttgccagtctcgatccgtcaggtctcacatagcagcatcagagctgaagatgggcgatggtgtggtcttctagttctttgctcagcggtatccgaggtatctgctacggctcgtcaaccggcatgaagaggtgtacgccctattcatgctcctcgtcgaggggtatcatttgcacaaactaggttcgtaccgccacccaccttcaagcatgtggcgtgggtccagtaccccgggctaacagttttgatgtctctgtacctctacattacacccagattcgacgtttgccgatcagttttacgggatgaggtatcgatcttccttaccggaccggccctccaaccgattatctgcccgacagaaaacactcatcctcgggttcgtcgtgagtcgggacatccagaattgccaccttctatgaagcgcaagtcgctcattgacgatggaattggatgtgaccggcgtgtaggtaggtatcccctacgtcaaggccaagatgaaggatctgtacgagcggttaggcggcgggttggatcccgagatcgccagggcgcgaagagagaacgatccgcgaggttctgtgagtcaccagtgcccctcaccccaggatcctaaacggctgacaaggaatacccgacgcctgggacttttgtttttctgcagatcatctcaacgcgttctcgtttgaaaaacgtagcgatgaagctcttcaagctgttctacccgtacgcggctctggcgtacgcgctgctcgaggtcgggtacgatgtgaatcacgctttcgcttcgagtggcgagtggaggtggtggatgtcgctcgtcagggtcagcgtgatacgggatgatggatcgttgacgcaaacaggtgacgaggtcagtgccaggaatcctagtcgattcgatccgggtgtgtcagaggcgctgatatggctccgtcattcggcctcgacccccttatcacagccatcatcgacagcgatgaacatgctatcttccttgcctcgtcaggccctatcgaacctcttcccactcaccctactggccctcaaattctcacaatggtggtactcgcccaactccccacgggcatctcatgccgaggaggcgggctccggggaacgggtcagggtacctccgcccaagatgctcagaccggccgagaggggttggtcggcgttgaatgaaaagaagcgtcggcctagtacgacaggccaagcggggacgagcgagcacgaggagaaggatgtggaccgacagcaggagcaagtcgaggagacgcttgatcgggattgggacgatgatagcgtatcctcgtcatcgtcatccggaccgtcgacaccccccgaatcgatcgacgggtccgacacgtcgtcatctttcccgacaaagacgccgctcgcatacggacactgtccgatttgccgggagccatgggcgaacccgacggccttgcctactgggtacgtcgggtgttacctatgtctttaccggtttgtcgagcgccaaggatcatgtcccgtgacggggagtgacttgagcggtatgggaggcgtagaaagcttgagaaaagtgctcatctagggacgatggggacggttgtcacgtcgcttgccaaagcagatttacgacgcgattttggccttttagaaacaataatgataccatacccttgtcctctatctcgcgcttttcgacgcaatggtgggatttgttggcagaacaggcttcatgattcggatcgtcgtcgatagatttgggtgcagaacccactcatatgtcgagctgctcctcgatgagtacaccccctacacgtcgacgatgaggacatcccctgcgtttcgaatgtaatgggtgcggggggccagcataaagcctatattccgagcgttcggatcggtggtcgttagcctcgagaacatttggttccttgcaattaccttccttcacctgcttgttatccgctcggactctttgccggttcaatcagctggcgtgatattccgtgtcgaaacggtggcttgagactgaggatacgatgttccgtcaggggtagacaagggtattacaacatgcagtggcggacgagtcgcacccatacaaccgctcggatcaactatacaaaacatcgtcatgtcacgttcaaatcatcgagatgtacccagaccctcgtttactttcgagccgtaggtcgtactcgacgatactgctctctgtcccggcgtacaaaaagtcgcccttttcgtcgaaacatagccctgcgatgcccacgcggcctcggtccgccgccgtccgaacatgtgaagggtcctcgttccatatcgtctggccaaatgtcgccttgagcgggactcgtaccgtgatctgagcgtcgaaagtcctcgcatcggcaatgtgaatgtgatccgtttcctatgcgcgttgccatgttccagaaatcgttcaacaactcgctcagtaaataaagttcgaaattcgccctcgactcacctcgctgaatacgagcaactcgcgcccgcttcccgccgggctgaacttgacgacccgtgcggggtcgcgccgaccgggactacctcgaccgggactgcctggccatgcggatcgacccggcgacgtcagcgtcgtcgggctgacgtacggggtcggtgagtcgggttcactcggacctccccagtacagactgtccacgccgtacgacgtcgaacgagacgatgctcggctggtgtagagcttggcgagcgggtgcgacgagctgcggcgcgtgtcagcgatgatgctcatcgggatgcagacgagtcactccggcgggcgcgacctaccgatgatcccatacggtcacctgaccatcctgactggccacgacgaacttccttccatccgcgctccaagaggtcgagaaccctgcgtcccgtgagccttcgtagcgtgcaatcttgctaaactcgcgaccgccaccccggacttcgtagagaaacacgtcgttggtatcgccgacgacgagcatggtcgtgccgtctggcgatatcgaggctacatttgaacgacacgcaccggcgactggtgagcgagctacgcagattacgggacagacccgccacacggcgtcttaccgtgattcacggccgtatcaaacttggtgcccccgatatttgccaactttttccttggccccttgttctggatttctccccatcgcaagggcgggctggcctgtgtcgacttggcattccgtatggcgaataatttcaccgacatgtcgttattcgagaccaacaacctgggttcgtcctcacggatgggcgagaaagtactttcgtactcgatcgtcgagcggaagggccgagcgcgggtcggtcgattgcgtcctcccgtccagttgcccgtacctgtcggatcctcccacgccgtgccttccgcagcggcgagaccgtggggatcttcggcgtgccagggtgaccgattgtcagggctagcgggcatccacgctctccgtctcgaccccatcctcgccgtcgtacccgatgctcttcctgccaagaccgatgtcgcctcttgccacagtgcggcccctggtctcgccgtcgacggcccggagaatgtcgtctcgaccgtcctcgtccccgcgacgctctcataagtgactgtcctcgttcccgaactgacccgtggagagaatccgctccgattcgtcgctgctggtggaaagatggtatcgaacccttcccaatcatgatccatcccttcgacctcgtctgacgggtcccgatgaccacgtgtcgctgaaggccctacagtcgtccacccgtcacccgtctcctcgtgttgctgctcatcatcgtcgtcgtcatcgtcgtcgtcctcttcctcctcatcatgatcctccaccctagctcgactcccgacgttgcgccccatcgacccacctcctcgacgtgcaaatgtcccaaatctcgcccctgaacccgacccgaccgtcgcgtacctcgcccctccgtcgtctccctcgacctcgaccgaattgggatacgtggcgatgcccaacccgttactcgtcgaattccccgtcctcctcctcgcacctactgcggacccggacccggtcgcttgatgcggatgattgttcgagggagaggaaggacgggtggggagcggggagtgtcccttgtacgccgggaggaggaggaacgaattgttgatcgacgtattgggcagggtcatggtcatgctccacgatccctctgcctgccctgacgaccccgaccccgggtcagacccagtgcgggaggatcgttgagagtccctgttcctctgcctctgtggggtccgcgggatcggtcgatcgagggtcgacggtggggtaggtctggacgacgacgaccacgacgacgacgaggacaatgcgggtagggtggtcaggtgtaattccccgttctgaccaccacaggcgagcagggtcgacgacgtcgtcaagcaattcggggtgaagagcaagttggaaaaagtactatacgtcctctgtaggtcgagccaccgaatcggatcagatcagcatgcgacgtacggggactgcaaacgccgagggatctcgtcaggggggctcaccttcgggttccactcgccgacgaccgccttgccctgcctgaccgcctcggcaaactccccctctccctcgagatcgaccgtcatccgggtgatccctctcccctggacgtagtacaactcgcctcgtctcccaggacagacgagtaggtcccggagttgaggatggatggtggtcatactggcggggaggacgtaggtcgggtagatcgtcggcgaggttccagaggacgaggaggaggaagaaggatgggtgtggggggagacgagaccccggagttcggtgtgcgcatatggatcggtagacctgtggggaccaggtacaaggtgatccgggccaattgtggggggggcagggtgtcattcaaagggtcatgagagaggaaggttcgggttaggccgaaacgatgcgatgcgatggtgggtgtcgtcggaagggacgaacctggtcatcctagctgatcttgctgtgggcagatgtacaggttattatgtatgtgagctgatgatctcgtgatctgggtttcgatgggcgcaacgagtagtagcgatgaggacgatgatatgtaggctcgtcccgtgggatggatggccgtgagttatgacgaatatgtgaacccgcgagtttgaaccctagggtcgtcgtgaatgaccgggaagaaacagtcgtgacgatatagcctatgggaatgctagcaagtgaggtataatcgtttcatgatctgatgatcgtgaacatgtgatcttggtatgggtggtggatgtgtcgaaatggatagatcacttggatcacttgacgatcgaatcgaatcgaatcgaacgagatctgaatccatcgcagcccggcaggtcaggtcagttcagggtgagggtgaaggtgagatcgtgaccagcgcgccaaattgaatgggtcaaattggatgcaccgcggatatttcaaatgattaccaccgtgacttgctctaggttaccgtttcattatcacttggactgccgttatccaagacgtcttgcccgggtccgaaaacgcatcttttcgcttactccccaaggcatctacggttgtcattcaacacatcgcaattctggacaaggagatgaagaggtttcaagggattgcaagtgccaacgagtcgcgaccgtacgtgctacctctctgcaaggggatgacgaggacgatcagcgtcgacttgcggggctcgtgctattacaagccggaactaccgttcagatgatcgtttcgagtcgaaaggtatgaaagcctagtcatctcttcgagtttagctcctctgtcccggggcaccactgctgctagggcgcgacagatcggatggggcacgaacgtaggcggcctgtttcgagcaaacctcagcttatcaccggtcggccacgctttccggtcgaacggaccagtctcacttgagcttgaccatgaggggacgcatgaaacacgatctaccttgagccgattcctacgttgcaagtcgtcggtcgacatgatggacggaccatcggccgaacccacggaaaggcccggccgagatctcaacttgtcggatgtaaaatccgatgataccggatgtaaatatcggccgatgatgtgcgtcggggttgctttcgtcatttctagacatcatcctgcaacgatcgactacttagaccgatcacgacggtcaggtagcggtacacattcagagcattattggcatcaccaagttcaagtttgtatacagacaatcttcctactggacataccctcacggatcatcgcccgccctttatcatggtccccgcattggcacaagactcgaacccacaaccggcgaccctgtccaaggtctcccacctcgaagctccgttcagaaaaggcaagacatgggcttaccaggacgatctacctaaactccctgttcccaagctggaggacacgtgtcgtcgttacttgagagcgttggaagggttacaggtgaggcaacctcgaaaggtgtgggtttccagctcggaccgtttactcactccgattgacctcgtcgacccgacccctttcttgccgacaccgccacgaccggtttaggaccacgacgagcatgaaaagaccaaaaaagtcgtcgaggcgttcttgcagcaagaaggaccaaagtggcaggagaaattagtacagtatgacaagacggtggatagctatatcgaagagttctggtgtgagtcgaggcgggaccagaccgggccgaggtggacaatcatcgacgataggttttgatattcgggggtcgtcttggttcacagacgagagttatctgcagttccaggagagcgtggtcttgagcttggtacgtcatcccgtgtctttgcgagacggacccccgtcgcacggactcgatgctgatgattcgagtacgactcgtcacagaacccattcttcgtcctatcgtgcgtcccagtttcattgccgtcgaatttgcagacatgacgactgaccccaagtcgatccggaatgctaggacggacgtcacacctgctcgtaacaaccagctcacccgcgcgtccaccctcatctactcgtcactctgtttcatccacgacctgcatcagggcgtgctcgaacccgatacgatccggggcaaggggttggacatgtcacagtacacgagactgttcgccaccgccagggtaccgaccgcacgggggtgcaggatcgaacgacacgtagggagtcaacacattgtcgtcctccgtcgcggacagttttgtgagccaggctggtccagccgatcgttggcgacaaagggtgggggagcgcgactgacccgctagggacacctctttcttttgcagactggttcgactgtctagactcggactcgcgtccctgtctaagcgacaaggagatcctcaagaacctcgaagccatcgtgcacgacgccgacaagtcatccgtcctcgaagtcgctcagaatgccgtcggcctgctcaccacggagaaccgcaagatatggaacgaccttcgtaacaagatcaggtcgtccaatcagaacaatcgcgagtgcctcagcgtggtggattccgccctctttgtcgtttgtctcgatgacgccgagccgcaagatctaggcaggttgtgcgagaatttcctgtgcgggacctacgagatgagcaatggggtgcaaatcgggacctgcacgaatcgatggtaaattctcaacatctctctcaaacgatcaaccgcatcgctaggctgaccagctggccacgatcgtaggtatgacaagttgcagatcatcgtttgtgcgaacggggaggcgggaatcaactttgaacataccggcgtcgacggacataccgtactgaggtgagcttgaaacgtcagcaaaatcaaccttccaggttgctgaagggtcggttctttgaacagatattgtgcaggtagatagccattgcgcgttgcgtccatgttgagccgtcggcactgacacacccaacctctagatatttacaccgaattggtgctcttgtatgccaaggtgagagagctcagcgttgcacgacccgtatcgagtctgacacgttcggcccggacttcgcagtcgatcaacccttcaacgccatcactgttcaaagctaaactctcaccccagagcaagcattacaaggcgaaacccgacgagaaaatcgagacggacgaggacctcgagcttgcacccaaaaagctcacttggaaactctctcccgagctcaaggctggagtacgattcgccgagacgaggatctccgacttgatctgtcaaaacgatagtcaggcgctcgagttcaagggctacggcaagacgttcattacccgacacggattctcgcccgacgcctttgtccagatggcattccaggcggcatactatgggctttacggacgcgtcgagagcacgtacgaaccagccatgatgaagggtttccttcacggacggacagagtcgatcaggaccgtacagccagaaagcgttcactttgtaaagacgttctgctcggatggacagactcacgacgccaagatcaaggcgctccgacaggcatgcaagcgtcacacggagctgacccgggagtgcagccaaggccagagtcaggataggcatctttatgcactgtcctgcttgatccaaagggagatggaggagaacaaggacaaggttgacatcaagatgcccgagctctttacggatccaggttacagcttgctatcgacgtcggtcatctcgacgtcgaattgtggcaaccctgcactccgggtgagtttacgatcgattacctgtcgtgtcgataggggatactgatttgagcggtattctatagctcttcgggttcggccctgtcaccccggaaggtcatggtatcggatacattatcaaggatgaaggaatctcggtgtaagccaagagcaagccattcatgctatatacttggtctgacgtccgattattgtcgcgtagctgcgcctcgtcaaaacaccttcaaacccggcggttcctcgacacgctgcagtcgtacctctacgagatccagcgggtcctcattcaaaattggaaagacaacaatcaggcctccagttcgacgtatgtcgaccatactgggaccttgcgagataccaagacggacaaggcgatcgaagagcgcccacatgaaggacaagacgatgtggaggattcgatgcgtatgtctgggggattgccacctctttacaataaagctagtgctgacgctgcgtcaacttgtagtcagcggtttcgggttctacgatgcggggatcgatgcagtcaatacacaccgtagtcgaaagcacgcagtcggtatgtgctctgacttgatcaatctgtacaccagcgcgttttaataaacgtatcgccattcgcaggtcgcaccttgccgtcgtcggattactgaacaggtgaagtcgagaccgtcgattgcaaatcaccttctcgagcatgaaaacactgtatatgtacgtatagagaggatatgttgtatacgagtgcctcgttctatctgtgcttgtatacaactccaggaaaatgcatatgcttcgtcacgttcgtttcgtcttccaaagactgaagtagtcgttccattcgtactcgacatagtcgagcaggtaatcgtcaatagctcctccttcttcatcatcttcatcatcatccaactccaccctttcttcatattcgggctgacccccttctccacgaggtgtctgcccttcgccgacagacccagttcgaacatccttgttgtcgactgtttgcatctggccctcgtcaacgccaaagtcgggcgcgtcgagctcaacatcggcgtaagccttgcgagcggcctcgatatcctcgtcatcttcggccgcagctaacgcttcctgcatacgttgctgcgtcaaggacgcatcctcatcggtcaatattgcgtctcgttccttgtctagactggaaagaatgtcttctcctaacatatcgcgcagatccgtcttggcaaaatagtccgtcgtaaaatctccctcttgcataatgagatcgtctaggcgtcgcttctggttggcctttttcagcatattctcctcgacggtctacaagtgtctgtgtcagctagaatctgctaggaccttcggatcgcgacttacatgagcagtaaccaagcggtagatgtggactaagaacgctaccctgaatcagtttcgctctcgccagcaagctgttactcgctgctacttaccctcgcgcgtctgtcctatgcgatgcgctcgatccattgcttgtttatccatcgcgggattgaattcattgtcgtagactgatgtgggcaatatagacaatcagtcactatcaccaggaagagtcaggagagctcgacctacagataaccgtatcagcgcctgtcaagctgtttagagatgtcgtccgacctgattagtgtgtatgatgtggaccttgctcgcgaaaactggcttactttatgcctacgcctccagaacgggtcgaagcgatcagcgcaaaaatcttgggcgatgcgttgaatcgctctgtaaccaagagacgatcttccactttagtgctgccgtccaaccgagaatatcgatgtccatgatggctcaagaagatttccagaatatccagcattctcgtcatttgagtaaagataagcacacgatgcccgcccgctttcaaggttttcaacagagaatgcagttcctgtaacttcccacaatcatgctgcagaagtgacctgtccggaaaggcgatctgtaatttgactgccatcgggtgaagactatcgaagcttctaggttgcttgttgatgactcctttcgcagcctcgggaagcgaaaagtgtgcaagatcgttggcgacgacagtcgatgtaatagcagcaaatcggtccagagcacccttgtgggcggccagtcttccgggcaaagactgaacaattcctcccggcacgtcggtcgccgcctttgcccagtcactccatctggggacgccgagctgacgtaccgcagtgatcagctcggagcctagcgcgggtgttattgagcaacggtcacgattgacgattttcattctacgccaccgtgcttccgtggcgatcgcatgactcttcgcacggaaagccttccaattttcgacggtcctgacgtcgcgtatcggtggcaacggatccagctcggtacgcggcaagaaatcacttgcgtctagccggtgactacttgccatggccaagcgggacgatggcgtcgtggtcgagattcgcaaatccatccggacctgatctgacgaggtggctgctggaagtagaatttgtaatcgggtgtacatgggctctagctccccgaggacagatcgatccatcgcgaatgaagttcggatagcgcggacctcgaagagatcaggatgattgcagaccttgcggagctgcatcaggcaatttgctacgcccagatagcctcctgacaccaaactctcgcgtgtcgatgatctcgacatgaattcgtcgtaaaggtaccgctgtcgtttcgataggctgcaatatattacgtgttcaaattttcccggaagctgggtctcaacctcggctttaagtcgtcgtaaaatgaatggcctgagaatcagatgtaacctgttcacggtagctttcgcttcctcggacaaggtcccacccagctcgatggccttttccattggatctggtgaatagaacactggtcagtgtcgcggcaccgatacgcgacaaccgtgagacctacttgaaaaccactcattgaactctttgtggttggcaaatccgccggtttcttcgtcattggccaagccttgaggcatcaagaagtacaaaagagaccacaattccatcaggttgttttgcagcggtgttcccgttaggagcaggcgtcgttccgaccgaaaaccaagcaacgtctgccaacgttgagatcggaaattcttgatattgtgtgcctcgtccaggatcaggtattgccactgtcttcgcttgaagacaaactcgtcggctagcacgatttgataagaagtaatgagcacttcgaaagcatgaggggcgagccacccttttctgagttcttttctctcctgctgattgccataatatgtcaagaccttgaaaccaggtaaaaacttcttgaactccatttcccagttcagaatgaccgaagtggggacgacgatcaggtggggtccccattgaccgtagtcacaagctaggtgggccaacagagctatagtctgcagagtcttgccgagacccatctcgtcggcgagaatagcattgcgtttctcccgatacagttgggcaagccactcaagccccgccgtttggtaaggccgaagattcgctcgaataaggaacggcgtgcgcatagacgtgccggtatccttattcagtatagagcctcttgggtgtacccctgagacgtcttcatcggctatgctcgattcagtaccacttaacgactcggaacgctcctccgtgttcgaattggtctcatctgagccggtttcagacgcgggtccaaccattgcgggattcgctccatacccgtatttggccatcaattgatccagaggcaaatctgcgtccgccagcaggccttgatcctcttcatcatcggaatccatctgcgcgtctccttcttccatctccacgtcgagcatgcgatcctcgtccgaaacgtcctcgacggcagcaaactcgacatcgttcaggtctgggtcatcgctgggatcttcgagacgtctcgagtacttgctggtagatcgtcttggacgatggggccgatttcccttaatctgaaggggcgcaatctccttgtctgcacctgataaactagacaaggcgttttcatcgacttgtggagcaatttccgagatctcatctgggagtccggacttgaaactttcattcggcttcgttgccatcgacagctctctggcggattgtcctgccttcttatgattggcatcccggctggcgaagcgatcgatgtgaacccctctatcaggtctcctggcatctagtctttcttcttcttcttcttcttcttcttcttcttcctcctcctcctcctcctcctgctcctcttgctctcccatttcctcctcttgctgtcccttttcctcctcttctttctcttcctcctcctcctcctcttcgtctgcatcagttaaaagttcctctgcctcgttcccgtatgtcttaaaacagtcacggttgtccacttcgagggagtcttggaatgttgcaggcggctcttgctgataagcgatatctttgctatattcccgcacatctcgatcgtcgcggccccgctcgaggtccttgttttctctccgcgtcgtgacctcttcctgctcttcctcttcctcttcatcgtcaaaaacatcttgccctaggtcttgctcctcttctctttccctcgccttttctatctcttcttcccccaaccctcgatttgactcgttatcttccgtattcttctcttcatcatcatcttgatcggacattgcagtcttggcgtcttcggaatcgaattcactcgtagtatcattcgatggctgatgatttcccagtagattccggctcctctccaggattgactgcaagtgttccttgcctagccgctcctgttccgccttttccgctgcgacatgtctagctcggataacgttgaccgcgagctgccacttggccttgacagctttagtaagctcccgcatcatctgcttgcgtcgtctctcttccatcttctcggcaatgtcatccttgttcaattccctgtcccagtagatctggatagctcgagcaatcttccgagcgttggccgtgcggatcttccagtcaaccaatatggcgtttctgacttgagtaacatgcccgattatatgatccctgtgatccggtagccgtttgggttcagggaatgctcgcatagcgctgatcgtcagcttcttggacgaccggtccaccctgctcggccccttatctccatccccgtcttcctcagagtcggcttcctcctcgagctgtcctagcattctcccatgctttctgaacagccgtatccgttcgcgagtcttggccgtcccgttgatcagatttcgtaaagcattgtcctcgatgtccttttcctccaacatcgtgtatgattgtaggtatctttccaacgattcatcgaattgtgcattcggctccactctttgttccgggcaggtaagacggaacgccgcggaggaaacgatcagtggtgaaggggagcgttcttcagtttgacctttggctcgttttcctttccgctgggacgttggacccgcaagttcggctttccgctttgctcctcggccggtcgatgcgacaatcacggtgtcctcctcgacggcctggataggctcgctagcttgttttgaagctttgcctcttttgctcgtgcttttcacagccgcaacagattgcccgggctcgacatgtttgaccatcgtgactgctttccgggatctgctgtttgtcattggcagatcttccaccacctgctcgacatccttcggaggcgcagctttcgcggtttccactttcttcgagcgagctaggttgactgatggttgagggagaggggcagggagccgtcgtctcgacgctctgccgggtccgagcaagtgaccgtgcttcaggtatagatcgtatcctcgagcgtactataacgggagattattcagcaacactgggaaaaagcaagcaagtgcactttcgactaactcgttcaaagtcctgccctctttcgtgctttacgatctgtttcacgccgattcagtgaccaaatcgagacagagttgtatatggaggctgtccaaactcacagctgggtcgaacccggtaatcatggtaacgaacgtctccatatgataatgttctcttacctatacatggacccctcccgatcagacaagtcctctccagcgcctcttttaccccaaagaaaactcaccagatcatcatgctcgtcaagtatccgggccaattcagtttctttttccctaagtagctggtcccggtcgacgggcagaacagccggttgtcctggatctttcgccatgacaaaccgctatctcttctgagcacaatactgcttatgtctggtagcagtcggtatatctatagcgctctgtgcagccttcgagcaagccggttacttcgttagaaaagcggagaagtggtgtaacaagatgtaagtcttagctccctggtcgctctcgggtgcgcgttcgcaactttggtttgagctaggaacgcgtcgatcacgttataaccaggtcgtatcctgtacaggtcattacgatcgttacatggagcgagaggttaagtggggtatatgtaacattccctagctatatgaagatgggttcaaatcgtcgtaacacacgatgtaatcgtgtcgtcgtaaagtatcaaatgcacgggcataatccgagatagtgcgaggtgaacgtatgttatcccctctacctggtggttcccctcccctgtctcctcctcatctacgcattgcgagtcctggcagcatgtgtggctttgagccgcttgattgcatcgggtttgtaaccgagcaagccctttcgcttgatgccggccatgacaacctcttgcccgtagcccgcagtcacgagatcctgcttatgtcctgcaagcgccggcgaatcgagctttcgtttgagcgtgagtggctatggaacacgggaggataaacttacggagatgaaacgacatgtccttgggtgtcaatgcgacctcctcctttgaacgcgctcgactggccagactagcgcccctcaggttgtccccatagaaatcctcggcgagaccggcaaacaactgagagataggaaataacatgggcataatcacacgtcgtatcagtcaaggagatcttacaagcacgaagctcgatcacgtagcgcatcagtcgagacgcgccttttgaatgccgtcatccattgtaccgcccgtaacgtccatggccagctctttgacttgctcagacaaaatctgttgggaactcttgggaggcttgacatagcagtaagattccacggcccgttcgagttcgggggtccacggcgtgttggaccttgcgcaaagttcacggacagcttcgatcgacatgttcttgccgtgcgtttccttgtatttttggatttccgcgggaagattctgcaacgtgacgcggggaggctgagccggttgagccggctgcggagctggcggtggagcaggttgcttaaatccagcaccttgctgttgctgtccatgtcccgccttcggctgtggtcgctgctgctggttctgttgctgttgctgctgctgctgtggttgttgagactgttgcgactgttgttgttgctgttgttgctgatgatgctgctgttgctgctgctgcgaatgacgttttgaatcctcgagccttcgcgccatgacgtgctgcttgacccagttccgagtttccctctgttcctgagtgatcgtattcgtctgttcatcacttaacgccatgtaaaaatcaaccgttgtcttcgtcaatgtggtcgggtcgagatgaggcggagccggtctaatcgaatgcaaataggcgaaagggtttccggcagtgggattcgagccagagttcgcattctgattcgggttagcagcctggttagggttagtctgagcttgaggaggcggtctggacgctgaaggaggtttggtgtttgggttagggcccgtggcgccggcttgcacttgtccgatcgaattctgcccggcagtcatggctgagttcggattcgggttcgcgtttgggttctggttctggtgcaagttctggttcgacgactgcgcggtctgtttgggtgcctgctggcgaggctgaggcttaggcttttctacaggcgcaggaccggctcgcacgggaggcaaattgaggttcggcaagggaggaggattcttggccaagatgtccgctgcggccgcgtttgtgttttggctggcagaggcggaaggcccggccaaaggcaaggcggcgggagaggcactgccgctcgcacttccaggagcactcccgttacctcccgatccactaggcttcttcagggcggcatggttccaaattttggtccacgccggcttggcatcagcgttctgtagtccggaagatcgatcgaatatcgtcgttagatcgtgttatcgcgacacagcgatcccccaagaccgctgtcgcggatgcgacggtgctacttacctcgtcgaaccatgcttgtcgctctgaatgcggccagtacaaatgttagctcgcaactcggttcggcaaagcccgattgctattccgaaactgaccagcctcgctcatggaaaacacctgagcccatgagtacttccctcccggagccatgacgggcggcctcgtccccgcctgaccagtttgaccaggagcctcactggacggcctgctgggtacaggcgtcgtccccgccgaggtcttcgccatcggttgggggacagcgcctgcagcgggtggaggcggcgcgggctgcgcgactggtcgagcctggggagcgggtttgggtctgggctttcccggaccggccgtcaggggaggggtaggtcgctgcgcattcggagtgccatacccaggaggacggggaggcacccatccagggggaacgttcgacgtgccggctttcctggcagcagcttgagctgcctgagaaagcccagcttgaggagccgtcgaagtgggtggaggcggccgcggcctaggttgagcattggtcggccctgctgccgcattgccaggattggcagccggcccaactctcgcttgattcttgttgagttccagtcgcatcgcctcccaatcaggtgggagtttgatgtcaggatccagcttctcagggaggtcgatgaaggggtccggtagacccttggcagtgaggtacgcagcggcctgtcttcggtgctttgggatgatcatccgcaactacaaagtatggcatcgtaccaatgtccacgggaatatcagatccttgtgcgagctttgagtttgattccgaactcgagacttacctggaggatggtagcggtggcgagtttacctgcccgagcctgagccatcaagctgggaagcgactcgtaaagactcttgagctgttgtggaatactgccagccgctggttgaggcgggactggtgtgctcgccatcttggtagctatatgtaccacttatctagaagactaatgagtaacaggtgaagaaggaaacgggggtcgatctggtctcaagtcagtcttatacagggacgaaagtgaggttgaatcacctctatgacatgctatgggtagctacgcccgatctaaggttgggttgagtcgttcgatgcgtcacgtgattgttcgataccctcgtcccctcttgtggcccatccagtcaatcgacatgttcaactttgaacatgaatggtcgatgatgtaaacgacagaagcctgaagacaatctcattctatcaaggcttgtctatcagctacagctcgatcttttcctggtagaatatcgccatgatcccttcagcagcgcttctcagcaggtcggcctggaaaggtaagtcgaatcgcaatcgatattttcgactctccaacatcttttgatcaaccctatcgcttcattcaatcataggtcctttcttcaccgcatttcctaatcttgccgatgcactcaagaacaacaccccaatctttaccaagagtcgggcgtccacgatcctgccttcgttcgtcgggctccgtttcatggtacacaacggcaaagactatatccccgtggcagtgacggacgagatggtcggacacaaactgggagagttttcacagacaagaaagcgattcagctatcggtgggtcccccgaaagggtgtcatgctccgctcggagcccgatgacggtcgactggtgactgatcctgtttttcacacgttagacaaaccaagaaccgttaatccccttcccgcacgtcccgccgtccggcatcttacactggagctttcaatcgttgtatcaataatcgggacctatccagagtcccatatacgcatcatcggcatcgtcatgtcggaccttgaacatggtctccagctttggtgcgattatcatgttcttcttgaactgcttgcgggtaaatgaggtgaacataatggggttcaccgccgaaagaaacatacttgggtgcactattagacacgacgtgctccttccttaagggttttgggaaatacactcttaccaagaatggccagtccagggaaaccttttttttttgcttgaacccaagatcatctcgacactctgctcgagagtttctaacgtcgcggcgcgaacgacatcgagctcgaagccatacacgatctggtagatcctcttggacacgactagcctgaaattaaactaattgaaccgattcatctggaggaaagggatcagtgcccgcaaactgaattgtgcatcaaatgcacctttcagagacaagtcgggggcggtattcatgtactagtggtgatggaaggggacctcaggttccatgccaacgccactcgagctcggaaaatgcacgagagagccacattgacaatactctctgattatcaggaaccggtcgcgaaaatctcctcttgctatttgaaaaccttgatacaactaggaagacagaccacacattatcatgacacttaaacacctgtcctgacgaccaccttcttctggccggagaacctgatcacgtcgcgcttctccagaacgtagaggcatcgttccagcgcgtgctgggtgtatccctgttgttgaacgaactcgcggaccagactttggtaactcgtcgtccatccgatgggcaatctgcgcctcagctctttctcgatcttgtcgatctcctcgttgagttcgcctcgcgagagtccgtccaccgacccggccgagacagcatccatggtactgaacttgaacaaccgaatggattcctcgacgtggtgaggcaagaccgcgggcgaaagcgtgatctttgcgagcgattccgagattcgaatgatggcttccagctggcggaccgtgatagggatcgaacttcgctcgtcgttatcgcgttccacttgttgaacttgtttccgcagtccgacaaagtgactacttagcagttcagacgcctctggcgaaagtcgaggagcgcatcgactgcaaacaatccgaagggtcagctccattgacatgatgtcagggcggatcggagtactcacgctttgcagaaggaaacgtatcgcttcatcttgtcaatatctatctctcccacggcttcctcctcgttctgtcggttcatgtgaatgttcatgacgtgcttggcgatggtctacgcggatgtaaggtcggatcagctcgtgatttcatcacctttggcgatctggactcaccctatctcgcatctcgttgtgctcatctttgacaatgaaaatcatgtcgaaacgagacaggatggtagtttggaaatcgatgttctgagcgagatcatgcgaattagttatccgaataccatcacccggtcggggcgatgacttacctcgccaggagtcttcatgtcatcgtatcgtccgaataccgggttagccgcagccaacacgctcgtcctcgagttcaagattgtggtgattcctgccttggcgatcgaaatggtctgctgctccatcgcttcgtggatagccactctgtcctcgtctcgcatcttgtcaaactcgtcgatgcagacgactcccccgtcagccaggaccattgcacctccctcaaggtagaactctcgctgcatgaggttgatctggttagacaacgaatcgtttgaagcacgggcttagcagactcacggtgttgacatctcgttgcacagaagcggtcaaaccagccgccgacgaaccctttccagaagtataaaccgagatgggcgagacctgcgaacgatagccgtcagcagccagatccagcgcatcccattcgcgttgagtcgacttgccttttcgacaaactttaacagctgactcttggctgtaccggggtcaccaagcagcaggacgttgatatctcctcgtaatcgcatcccatctggcaagatctttttgctgccaccgaatagtagacaggtgatagccttcttgatgtctgtagcgtcacggtcattagcgcgatggatgctgaatgccgctgaaactctttgctgcttaccaagactaccaaagatactcggcgctacgctccgagcaaacctctcgtaaagatcatcactcctgctcaacctcagaaattcttcttcctctgcaggagtaaagttcttcaaccctccacctccagcagccagcgaggtgtccaattcaagacctagaatccggacatagggctgtcgcagagctggagcacccgaagtagtcttgttcttggctggcgcgtaggtagagtagattccggtgacgatgactcttgacccgggaacgacctggcccgtcaagtatctgtgaagaggtaggtagcgcatcagccgttgtgtggaagggcggcggtcgtctaaacgatcggaacgtaccgctcggcgtgcaataccatgtgtctaggcaactctcctacgggaaccatatcgggtgcttcctgcagcttgatcgattgggcgtcgacgaagcgacacttgtcgtggacgaccacgtaagggtcgagcggacacgaattcttcccatcttgatcgaggctgatagataagcaagtgaagagcttcaaaagacaattcttgtgggtttgttgcaatctttaggatacgtacgcatcacaccgtcggggcagacttcggtccgttcccactcctccgcccggctggttcagcattcgcgtgcttcggcatcctttacattgcaggaacaaggtcgtcgctcgagaagagagttgcgaggcgttgatgacgatcccgggcagtcgcacgagcttggtcaaggtatttgcctacagacgcccgcggatgttattcagttcgtgatctacggtcatgctccccgtcttgccgatctcactcaccgtcaactcgcggaactgtaacatgttctgtccactcctgatcgtgacctgcacgtccgggatctccatctctcccaaatccccagcgaccccgttcgacccgagattcccgttcgacgctcctccgtaggcgttggccgagttttcctcggtggtgccattgttcgtagcgccatccctgggtacagtcgtattggccgtccgattggcagaacgagagagtgggtggagaatttgacgagaaagtcggagaagagcggattcgagctgatcgagtgggaaggtgagtgacgggtgaatattcaagggtcttctgatcaggtgattgaggactcacaagaggaatacactcgcccggacgttccatcaacaactgcccgagctcttcattgaacaacaacaagtcgttcaagtccacatccagcgtatgctttccgagcagtaacaagctcctcagtcgatccctgttgaccattccaaagacacggacgatattcagcaccgagggccagcttgtcgacttgggtcgaatcgtaacgaccgccttaccggtagacaaactctcctccgaccctgaaaccgtgaaggaactcccagaacgccttttcaatctgggcaggggattcaggggaccgggaagcggcgtccccgggcaagacttgaacactgtagactcggttgctctcctgtatgttatgtgaggtgggatcgctgtcggtatcagcttggacctgaccactcggggagcagcgacatgggtacataccatcttttctccttcgcaggctatatggaagataagctgatggtaccaagctgagcttgtcgaggattgcaccgatcgagttcacttttactgtcgccttgcacaccggtgcgcacccttggttgacaaacagcccctcgcattgctcgacacatcgcaaacaaacgcgaactaaatgaaatcgacctcgacattcacgcgcgtcgaacgcggctgaaccagagactctgagtgaaccgtgagatttggagaggttggggatccgtgagaaagcgaacgggtctggtggcctggtggatagataggatacatcgagaatcgaaatggttcgtatcgtcatcatgtcgccggttcgtaaaaagaaggccattacgagaccaggcaaaggggggtcgttaaactaaggaaaaaaaggagagcaacaccctcaaacctctactcgtcgatatccctaccctcgacctcttccgtctcccggccccacttgtccccatgcacaaagtcgtcctggcccccagctccttgagccgccatctcctcctcgtccatctcgtaatccccataccctgtccccgtcgtagggtattgttcttccagctggtccggatcgatggcgacgggttcgggagcaagatgacgttcgatcaaatcgagcaattcttgatgttgttcttcttcaggcagacggctatccagctcttccatgctctaccatatcccccccatatcagagtcgtcagcccacgtatcaactctctcgactccgatcctcatctctgtaaccgactcaccaaccacagttcgacctgactccgaggtggaaagttgacaatctggagcatttcggctttcgtcaacttgtacggctggagggcgaccatcaagtcctggatcaaccggggattctgccgccgggtgacggtgtaatgtgtgtctgtcaggtatttcatggtctgtccattcccaggatcctggacgtcagtacgggggttaagccagacacgccggaacagataacgcagggactcaccccgttggtaatgtatttcaaggcatccgtcatgggtctgacggcgtagtactgctccttgtccttgatgctctggaggacgaccgcatactcttcttgccgctttttgagtcgttcttccttggtcaagatcggctcgacgatcggtctgggcgggggagaatcttccctccgtatgggctggggaaggggtttctttactcctcctcgtttcttggtcccgttcgtctgctttttgctctcctcttgccacttgtccagagcttcctggtactccctatccctcaactctaccctctcccgcctctcctcttccctctgacgggccaggtccaccttttcccgctccttgacccgatccagcctctcgagctccatctgcgcgtcttcctcataggtaggcacgtcgtccggttgaccgggttgaccgcgttctcgccagatttgacgggaaatgttgtgtttccgacattgagagacaatctcgaattccttttggagggcttcgaggtgggtcaagacttcgtggttggtcaggacgccagctcgggctttgaggacctggggggtgtggataccgggtcagctgggtaggtaagagtggtcagaggataacgacggaccttcatagtttgagcctctggtaacgatctgcagcgtgggtaatgagttggcaggacgaagcatcccaatttacagtacgatggtcgccttggtcgattgaatatctactcgcaagctcgcaatcagccgggccggtttcgaagccttttgtatataagtgtcaggttatgttttcgatatagttatcaggtttcgataccttaaaattcatcccatggttcccccttgtttgtctcgcgtgagaatccactcgattagcagcttgtggcttgttaccagcttagtagcttagtagctagctcgctgtgtgtgtgtgtgtgtgggtgtgtgtgtgtgtgtttacgttacgttgatcacccacccaatgcccatggccaacctgcgttcaagccccagccactctcgctcactcgctcacaataataaacatcaccaccacggccaccaccaaccaaccaattcgaccaacctacccaaaagacacattctcgatttcgaaaacaacttcaacctcacacctcgccacaaccacactcaccaccttcaaaataaaagagagacgtcgacaacaacacacgtcttcttctcgctttcacaaggaaagactcgatcctaccaccacctatattcaaactagctccgattcgggattcacattagctagaacctctccatccccatccccctcgtatctaacctcaagctagtaccactacggatcatagaaacaaacgaccaggtcgacgtatacaactcatcagacctacaacccccaacgaatagcgaagaaacgacttttgagatggacgcagggactcttttggtaaactcgttgtcggccggtacgtccgtctcgggtgctcgaaccctttgtcaaaggtcgcggagacagctaagactgactcggcaacgacatgtccgtcctcttcccagacaatgccactcggcaggaagccacggctcagctgcagaatgccatgcagaccgattatgtgagtgctcttgcatcccttcccggtcgtcggttacgggcgttgaactcgatcctatcgaccgtccgatagggcggctacatgcatacgctagccatggagttggcaaacgagcaacaacagagtcatatcaggaacgcagcgggtatcgccatcaagaacgccttgaccggtcgagtgagtccatacacgccgttaacgtcgcgccgtccgcgagggggaggagagattcgctgaaactttatgaggggcatctcgaacgttggctatattctataggaatccaccacccagaccgccctgctcgaacaatggaagacgctcgacgcatcccgccggaccgaactcaagaggctctgtctccagacgttgggttctgccgataaacgagccgcgggagtctcggctagcgcgatcgcggccattgcggcgtgcgagttgccttatggagaatggaacgagttgatcgggaccttgctggatttcgtcgggcaggataacgctgggttgagggtggctacgttgcagacgatcgggtacatttgcgaggcgatcgtgagtatcaccagggacatgttcagtacgggtcaagaaggctcaagatctcgcgatgcacttgccgttgaacgtcgactcgatagaaccccgagtacctcgcttcccgatcaaacgagatcctcaccgccgtcgtccaaggtgttcgcaaggaagagaccaacatggacgtccaggccgctgccatccaggcgttgtacaacagtttggaattcatccgggacaactttgaacgagagggcgagaggaactatatcatgcaggtcgtctgcgaggctactcagagcccgtcgataccggtccaggtgggcgctttcgagtgtctcgtcaagatcatgcagctctactatgacaagatgaagctgtacatggaaagggccttgttcggcgtgagtcctaggccggctcgaaagaaacactccaagattgggtggctgatcttactaccgccttttctgtcgctctagttgacggtcattggaatgaaaaatgaagaggaaaaggtcgctctccaggccgtagagttttggtcgacggtgtgtgacgaagaggccgaattgatgtacgaggcgcaagaggtgagcggatccggccaggccggttgattcgatagcgacaggcgagtcctgaccaccgtcctcgctttcgctacgatcgtatcgcaggcggccgaggtcggcgtcgcgccttcgatggagagccagaactttgcgcgggtcgccctccccgagatcctgccccagctgctcgccctcatgcaaaagcaagacgaagacgcagaagatgacgagtgggacgtggccatggccgccggaacctgtgtcggactcttggccaccgtcgtcggtaacgatatcgtcgccccgaccattccctttatcgagcaaaacatccaggccggtgattggcaccagcgagacgccgcggtcatggtctttggatccatcctcgacggtcccgaggattacgtcttggcacccttggttcgacaggctctgcccacgttgattgggatgatgaacgacggtcacgcttccgttcgggatagtgtcgcttggactttgggtaggatcaccgacctcatgatcaaggtcatccagcccgaagaacacttgcccgaattggtcaaggcgctcgtgtacgggttgcagcagaccggaaggatcgcttcgagctcgtgttggtcgatcaagaacttggccctcggattcagcgacgaagagtccgaggcgaccaccacgccgctgtccccttactaccgcgggttgatggaggctttgatgagcactagcgagactaggtgagggaggatagcaaagcttaggcagtaaggctcttgctgacgtacgcctgcaactcgtaggaacaatgacggcaacgctcgtaccgccacctacgaggccattgcgactttggccagcactgccgttcaggatactctagagtttgtgtcgcaggccggtctcgcaatcttggctcgaagcgaaaagctgctcgaaatgagggtgagctagcgtgtcatcggccagttgatcgagcgcagggattgactcgaggcgtttacatgagcagaaccaactcgttggaagcgatgacaggaacaactggaacgagttgcagagcaactgttgcaacgtcatccaggtgagtttcggtcaactaggcaccggtttagtcccctgaccggatcaatctattctcgctccaggccatcatccgaaaggtcggaagtcagatcgagcctttggccgatcgaatcatgaacgtccagctccaattgctgcagacttctgccaaggacgctgccgttgccgaagacgcctttatgaccatctcaagtctgatcctcggtaagtaccaagcctctctccatcatcaacctagacgtcgttctcacaagatcgtccttcactctagtgttggacgagagcttcgaaaagtacacgtcgcacctcatggagttcatcttttcagctctgcgaactcttgacgagttccaggtcttcaccgccgccgttggtgtcactggagatcttgctcgagctgtcaagaccaagatcgcgccttacgccgaccctttgctgcaagcccttttggccgccttgtctagccctgtcctccaccgaacggccaagcctaccgtcgtctcggtctttggtgacgtcgccatcgcactcgggagtggcttcactccttatctccagaacgtcatgggcatgctctcgcaagctggacaagtcaaggccgatgctagtagcgatgctgggatgatcgactttgtctgggccatgcgcgagtcgatcgccgaggcctttatcggcatcttgaccggtctccaaaacgatcgtgagtctttacatcgattcaatataaatagactgtatgctgacctagatccgatcctacagctgctgccttcgctccttacgtccagggaatctgccaattcgtcacgaccactgccaacgacgacgaagaagcttccttcgactaccttcgaacatgttacaacttgatcggagacattgcgagcacgtacaagggtcaaatcaaggagatcttgttggagaacagtatggcacatttcttggtcgtcgccaagctcaggggatgcaagcagcgcgccacgaaccaagccaacaaatacgcccgacaggtaagtccacctaacaaaccgagtagactgctgctcaagctgattgagcttctttcgacaggctgtccgggctgctgtggcttagaatctgccttcgaacgtttcaagccctcctacacccgatcatcacgcccatcctttctgcaaccgactgtcatcgcatcgatcttttaattctgcatcatattttccctattccaccacctcgacggggatggccaagcagctgccccatgtaaaactatagcaagagtcggctttacgacacgacacgcaggcaaacagacgatttacggctaacggctgtaaattgaaactggaccattacgtcgtccgccatttggacggcggcgcccgataccctcggaccggacgagtgggccatcacgaacagaaagggaaggacaaggacaaggctcatgtgcatctgaaggatgacaggtcttgttaggcatcatgagagggtacactaggtggtcagtcgatctctagaacctctccactcggggttagaaataccacacccgagtcactttgtacatctccagattagactgagtgcatatttcctcgactgtatgtatcaatcacgcaagatattttcgcaacaaaccgtggtagcattctggctctatattacaagctacctgcctcgaaatcgagccgaagacgaatacaagagggagaagcatatctagtctatcctcctactatcggcttataacttgctcttggcggtctgttcccgaagtggaaaccgagatcagcacgatatatgtaggagcttaaaccggacggtctaccgaccttcaagacatcgtccaacttggtctacatgacgcaaccattcgtggtcgtcagtatatccgcgtttagagacagcatggaaaaggcctcaacttaccgcgaacatgatctgatcgagtgggtgagacgataccggtgagtcagtgtcaggctcagttgcggcggatcggccgaacgacgctgaacgactcacattacccttgaccttgagctgccccgtcatgaatgccttttgggcgttgaccttgccctcggactgtttggtgcagaatcttagcccttgtccaatcaactgactgctcagtaagccaaactcaccagaccgacaaagatatctgcaccaaaatgaaaagggcggagcaagatcagctcgcgagaatactgcaccatcctcatctgtcgacgtaacgtactgtctggcatcgtgatggtgcagtctgcaaaagatcaaaagaaaccacattggggcttagataacggggaataatcgcgtaaaatacgagccgttcctgtcgtcactcgcctgctttgccagcttcgccctttctgacctcccccttgttcttcatgtcaatcctgcgtgtctcacggaaagtcaagcgtatttagccatgatctaacagatcgtcccgagacaagccgtatccaacgcacgtccagatctcagtatcttccttgcccttgatgttcaattgaaataccccattggtctatgttgagtaatgaggtcgagatcagcgagccttagactcatgaaagcacgacttcgtgaccgaccttcttgacttgcttctgcttgtcttcatcagacagctgctcgaagctcttctgaagggcctgagatacacgaaccagtcgatcctcatcaatcctaggtacacaatgaaatcacttcagaagatacctaccgatagtatctggctggactattgcgtttcttgggagtaatcagataacgctcactcatgaggtaattccttctgctcggcgtaccttggaatcggaagccatgtctaagatgtacggtattcggtgacttctgctcagttctccagatctcatgaagtctgccactgctgtgatttccgtattacgggcacagataagataatcgattaattgatcatgcatccgttcgaaatgagttacgaaggctcgggtatcgatcaggcttgtgccgggtatcgtaggtggggcgacttgataacgcataagcctcggttttatgcgttttagtcaattagtcgaaagtgctgtcgtcatctctctctcggcctggactagatcgcggtcaccggaatgtgtaagcttgacaaatattgacaaggtcaagcttcaaggatcgaatgtctcactttagtttgagccacaccaacgtcttggtccgaatatagaggaacggatggttgctcctaacgaaaaacgattggattcggtcgccgatacggcaaaagacctccgcgttggactaagctctgtcctagaagagagcatgaacacggtcaagaagaatgcgagcgtgtgagcagctggattctgcaccattagctgttagatacccttttatacttaccgctcactggtgcagcatcgagcaagagtatttcacccctaccagcacgaaattacaagatttcgcggaaaagaatccggtcgtcttcgtaagtctggacagatacccaaatgtctttatgaacggtatacagctgactcccgatcgtaatcagactttcctcgcggtctttgggtttctttccgtctttcctctcctcttcgctttgtaagtccgttgagagagctcggtccccaattgcgcctgccctgacagatctatgattcaagggggttcatcgccttgtgcatgagcatggcgataatcggagccgtcatgttcctcttagcggttctgggcttcgtcctattctccactagtaagttgcgtgtgcatggtcgtggtccagcgctctcgctgatctacgccctctccaggcttcgtccttacccctatcttgatcgtcacgacgagcattgccatcttcaccaccagctgtctcgttggccttttcctggctactcggctatatatcctcacccgcgacgctgatttccacctggctaccggactacaacaatggttcgaagagaccaaagggcgagtcgcgcaaatgattccggctcaagctgtcgaagtcaaacaggtcgtcatccacggaaccgagacggatgctggggaagaaggggaagtggatgtcaagagggtcgaattacagttggtgaacggaaatgtgaagactgaaatggatagggtggcactcgtggtcgacgaccaggatcaaaaggctgagcagaagccggacccgaagccaaatgagcacttcaagggtctcaagggagatgaccacgccaaatcagtttacgtccaccatgccagcaccgcacctagttagccgatagccggtgtccgtatcaaattcctagcatgatcgctcgtatacttcggtctcctaatctagatgagaatggccgtttacatgagcctcgaaatacccgcgatcacgagctcgctagcggtcatcgcgacgatggctcactaccatcctcgttcgcatgtagcgccaggctcgcaaacaaggactgtgtagggggatccctcctcctgccttccgcactgaagaccttctctcatgaagttgaacgtaatgctctcatctccgaggtccccttcgaggtggcactggagtaccatgtgatcagcgggagcttcaaaggtcattttataacggtatatacctcgtaggtctggccataacgatggacacggaaggttccactacccgccggccaagccccgccctcgaacggttcgggccgatagagctgccagagaacagtcttcgcatcctcggcaaaagtcttcttgaattccaaagtttcgcagtgacctcgtcctgcgatttcgaagccttcatcatcgttggtcatgaagaccgagctcgatcccctgactaccgcggccgagagcatcaccaaaagtgggatggttatgtggttaattctccacattgtgttgttaaggcagtctttgatttgtatcggtgagaggggtgccgggtctgtattcccttctgcagacatcgaaattgtgttttttgaaggagtcttttatacagacaattcgccttgtggcacaaggtgtgttacgcacgcgatgccttgttgcgctgtgtcgctcgttcttgtcgcataaaagcgccccctttgtttcacaaagtctctaatgagttgggtaacctttgatacggagagggtatctctagacgatcgggagctacaaatacgaaacatcttacttgtgtacaggggatctctatgtaaggactttgccccataaccccctgagatgtcccggaagctgatacacattgcgcaagagagaatccctcatgctgtgcaggcgtgtcacgtcgataattttgtgatgacaggaggagcaataaatgtctcaatgcaaatcgcgcggggatattggaactcttgccagtatgaatgaatgaactcccactgatacgaagccagtcgacaggacaacgatctctaccaggtctagttcatgaaacactggtgttctcttcctcatcctggcatattcctctgatctgagatgaagggggcgcacagcgggaaagaccctttgtctggttgtgaaatggtatcacttttggacgcgatcataccgtgacacgtaaatgacgaaatatcacactgtctctcgtaatcctccatgctccatggaggtgaatgtgtcggcatgacccttcttttaatgcggtaagcgcgataaggcgtatcaagcacgagaacaggcgagatcggccggtcatctggcgacatcaggaaccagtaaaaggaagaccctgacaaacgcgattatggcgtttgcctcgctcgatctggggacagtgaaatctgaggtactactaagtatataatttgattatcaagaagatattcaacctgtactgaacgaatgagcgaaattgggagcgtatttttcagcaacaatcaacccctttccagaatcccaagacttccttcttgtaaatcaaccctcgcaaacatcctccgtggcaaacagattgaagcatgatgttccagtacttcaacggcgggaactacgagtaccaaacgcccaggactcttgtcgaggaggaaaattatgagagaccgctgtcggccggggaagatcccgatttcatggctcgcgagaaacagcaaaacgatttgcaacgagtcgacgagaagatgaaccgagaagtgaccaaggacgaatgcaagcaggaggcagaaacatcgccatctgccaccccggccccctctcgaggttggttgtcaagaatcgggtctacactggcgtgggctttcactcctggaccagatgcggccaacggcctgtttgcttatcagggccccggtgccgtcttcccaacccaccctttctttggcgcggatccggagttatcgatggcactctggggtttgaacaacagatcacctgagcaggagacgatgagagatggagaagaagtggaggacatgattaggcgggtgagtatgtcgcccatcgcctctggagatccatctggtacgtcgagggggatcggcgcgaggtgggaaagcgctcgcagatccccctgaggagggcagtctcatgccacacacggaggtagcaagaactgattgttgtaattattactatgtgacccgaggcttgaactgtcactctgctacacaaatcatgagaacggcatcgaccgagtttcagggatgaaacctgggccactagccgagttgacgatgcattttcacgtgatttctcccctgattttgacaaagtaaacacaaatcgggtagtagctcagcttcggagctcgggtgacaaagcagacaaaagttgtcaagttcaaattagatgactgcgataccccaagtagaggtacgaaccatcgctatagttgtagaataaaagcccgtatagctatagaatgagctcggaatcgcaacaagttcaattgcggctactacggctcgccaaggatgagtcgacttcgacttataccacggcaagcaagctcgcggacgatctactttcggcacggttcaaggacgtcctcttgtcagattatgcaaggaaactatttgccagtcctcagaagactggagtagaggatctgtggcaatcagctggtctggcatgttctcaaggagagccatcgagcgaagagtcccggctgagctcggaagaggaacagatctgtcgattggtcatcgccatcgcttgtctgcacgcatttgttcagctgaactggaccggtccggcgctggactttacatcaaaagacctactctctggagccgtccagaaccctgaagctaccgatctcaacgccagcctgcacaatgccacgatcccactcctcgctctcgacggagaaccagcctaccatctggctcaagagccatccctactcttgttcgctttgaggattctggatactttgcaagccgaatcagacggtcatctcgtatctcttccttggtggaatctgcgaaccggcttagtccaccgagctctcttggacgaacccgtctcgttctcctccgacctcttttcatcgctcgacgatctactcgcaccttccaaccctctttccgccatgctcactggcgacgacaaggtagctcttcataccgaggtaggactcgcttgccacctcctgggtatggacagacaagcctcggagcgattcttggccgctgcgaaagagtctggattgggatgggccttgacgggagctctaggaaagaggaccaagttccaggtcaaagagctcagtcagttggtgttggtagccaagagcaagaagagggaaagtgacgatgtcgaagaaccgaaggctcaatcggagtctatcaagtcggaggatgctgtcaaggccgagacgaacgggactgatgaggaggagagagtccccaacctcaagcttccgggaatgcccgagactttggcattgaatgacgataccctcctggaacagactcagttcacgtcgtcttccctcgactatgctggacttggagccgaattggcgcctatcaaggcggcggctgctttgcccgaaagtctacgagacttgaacccgcaagatcaacccgccctgcatcccttggaccaggcgctattgatcgacatgtgcctcgcacagcacaacaacacgcccgagaacggtctcactgcctcccagatggcgcccttcctcgctcgagttctgacacaccccaaaaactggtcggtacataccaccgctcttctcctccgcgctaggttggaatcgaaaaggtcgaggacgatcgaacggtcggctctgcagctgcaagcccttgtcgatcagatgcccacagcggattctgagcctagcgagcgtctgaggtatttccaccaactccccctcgtttcgaagtgggagatggagcgcgaattggccgtcaggtttttgggcatgggcgtcgtcaggaccgcgctcgagatctttgagcgtctcgagatgtgggaggaggctgtcaggtgttatcacagtatggaagatactgaaaaggcgattcgcgtcgtcaaagatctgctcgaaggcacaaaggctgagccggagattgtgcaaaagcgtgaaaaggtgcagcgatccgaagatgaggccggcaggaaggagacgaagcgtatccgtatcgacaatacgcgggaagccaaactttggtgcttgctcggagatctcgagccggaaaacgccgagtcccactatgaaaaggcctggaccgtatccaaggggacgtcgtctcggtctcagcggtcgctaggcggtatctacctcacccgagaggagtacaccaaagcgatccccaagttccaagccgccctcaagatcaacccgctctacgcccgaacctggttcgcgcttggatgttgcttgctgcgagaggaacgactcgaagaggctcgagaagcgttcagcaggaacatcgccgttgaggaggacgatgcagaagcatggaacaacctggcagccgtctacctccgattgactcgggagattggtgtcacgaaggctgacgatggcgaggtgagtggcggaactcgttgctgattgtcttacttaacgccggactgatatgactcccgatatgattactgcaggagcaaagcgtacctttcacgaacaagcaactcgctttcaaggccttgcaacacgggctgcgccacgctagcgacaactcgaaaatgtggcaaaattacatgatcgtggctgtcgacgttggccagctttcagaagcagcgcgagcgcttagcaggaccatcgagtcgaagaacgcaaaagaggctgccacccaggtggatctcgctgtgctctcgaagttggtcgacgctgtgattcgcgaagattggaacggcggtgctggtagtcgaacagcagatcagccatacacctccaatgaagggctggggctgttacccatcgtcgagcggctcttcgaggtggtcattctcccccgaatcgtcgagaccacacgcatttatgcaatctacgccaagctcttccggtggaaagaagactgggctggcgcactggagtgctacatgaaggcataccgttcaggaatcgcctctgacgaaaccgtcgagagggagctgccgaggttcagagacgccgtggaagatctcgaagaattggtcgacgtaatgaggctcttaggccctcgagcgaaggaacaggaagccgctcaaggtctggaaaaaggtaaagcaaagtggagcgactggaagttccaggcaagaacgatggtacgaacgtttcaaggtcgaactaaggatacgtgagttgccacagcgatcgcttcaatcgctcgcattagactaagcacaatctcgaactcacagttttggagacgagccggagtttgagcgcttgaaggacgttctggccgagctacgatcctagcattaggatttaggtcatggagatagcttgacgttgtaaacaggagacgcgatctcacttgcatgaaacgagtctattacaatatttgactttggcgtagactagacgtattcgattttggacctgatatcatgccatagttttgcctcgcaaagggtattattcccgaggcgtagagagataccgtcacatcctggttggtgtccggtgtagatcttggttgtgatcgcagtacgcccgtttgcaaagacttccatcgtaccatggtccagtatgacgagaagctccaacgattctagcctttcggcgtcatcccgctcgagcctgaacaacgtgtgcggtacaacctcgggtcgagtgtcgtaatgtcgcgcatcatctaagggaaccgatttcgagcggtcgagggtcatggtcgccgttgtcggatcgaagacgatcgaagtaccgatagtgtgatcgaaattgtgtcgcacggacagctcgatcttttcaggagtctccgagctgaggtcaacggtggcctggaagatggcagtgcgagatggaacattgcacaaattgatccagttcccttcagaggtgggaatggatccggactcccattgcagagatttttgagctcgactctgcagctgatgtagcacatcctcgcagggcaagatccgcaaacctaggatggtaaaggtagacgggctagagcctggcagcaattccacgctggagatctcgtcgagtttgtccacaagacatcccttgacaccctgaatagcttcgagcgcgattgtcctagggatcgccagacatccgctccatccctgttctcttcgtttctcatgcgaaacgtcatcttccgtgatccacgaatgagctacgacggctcctcgtgcggggtcataaaaggtgttcattgcgtaatagtttcctcggtcgatatagcccgagatgcggggctggaacgtgacctgtttcgtcttgtcgagtgtaatctcgcccgaaacgaagatttcttgtcgggcgggtctctgagggggaacctttgcagacggatcgtccgcctcgaccgatgcggcactcatcaggaagaaatcccgagctatttcctcctcctttccatctgctccctttatcttgctatttaaagtgacgaaattggccacctcgaagatgtccctcatgtctgctgcccatcgactattatcttgaccccagcactttgatcgactgccaaagtcacccaggtaggtccagttttcgatgctctgcttgttcatctcgtagaggaacaaggctgaaccgacgtccttgtaccctccagcgatgatcccgtatagggtttccccttcttctttgccccggagtttgtccagcgtggcccattctcgcacgtatgggtcccgccaggctacgacatcagaagctggagcgccggggaggatcgggttgttggagtacttttgacataccacccgacccccatctgcagtactgccagaggggaatgcgagcgccacagtctcgcagttaggagggtatggagagatgggccgggagttgacggatgtatacgcgatcacgtattcgtctccatcctctatcgtgaccaatcgatgagcaagacggcctggcgatgcggatttacatcgcaaactcacctttactatcttctccggtcaacctccttctcgttccctttggagcactgatcatacatcctgtgaatacaccttccacgtcataaggcgtctcgccttccttggtctcgtccttgttcggcgtcaagacggcatcattttgaactcgccaatctaccaaattgtcgctctccgcacaaccccactggatcttgtgccactcgttgatttcggcagtgtactgaaagaagacctggtactttccttctttggtaatgcatggcgcacaaggatcattcagccaattccgaggaggtaggagatggaagactggtcggtgggcgctgaaagcttcggaggaagcgctagaatcgggtccgagtttgcctacttccagattgtctttgttgaggtctgacattgtgcagttaaacgattttttgttttcgataacgaggatgtgattcgataggtcgaggacggagcaggagctctcgagttcccgagtgtacataagtgtgtacaagagatgtcgggcggctgtatgaccccatcatatgtacagcctgattgtctgtctgactcacggttcaacagcgaactttgcccgaagccgaacccgaaacgtccgaagtttgaccgaaactttgaaaacgtcaaacgccgatcacgtgtctactgctacgcagtgctactatttctcaagcaggggatcagatacgaagcatagcattgatacacgtggtatagcgttaaagagtctgtatcatcggtctctcagtcccatcgcatcttgaacaagcccttcttcttcttctcatccgttggaccttcctccttgtccttcttcttgtctttacggaaggatagcttagagttgaagcttggtgccggtgaagacgtcctggctggaatcaagccggacaagtgcttggacgagttcgagggcgctggagcggcgatctggggcggcggtggtgctagggctggaggcccaaccggctcggtccatatgcgggaatccaaaatcctatcgcggcaagcacaccgacctgagtatcacagcaggcccgaaccgagacctgacttttaactcactgctggaatgagggaggtgcgccagagagcgacttttgcagcttgacgtaggggctgagcggtttcgcattcggagggtttccgccgataccagatcggcctagcgatcgcaaatctgcggcaaagctctccggcgtgacattgtgtgtagatcctatggatggcgggcctctaagccaaatgctcattactttccgcgggccgtccgaaactcaccgatgatgacctccttgtttaacgcgtttccgatgagataagccatccttctctctgaatatgtcaaaccgccggcaacaaagataatgaacctctgcctcgactccgtcgtcgccttctgtctggcttcaggggctttgtgccacgtgggtcgagcacttcttagagatccagtctgactttgcatagattgcgctgctggccgaccttgggtccgaagggaagcaggtgggggtccagcatcgacgggagcttcacccaaatatgggaaagacgactggtccaaacggttgcccgattgttcctgtggcatccttgttagtaacagagcatcactggtcacagtctacctcaaactcacctcgatcaactgtttgacaagaggcttatatcgcgataattcatagtcatcttcggtccgactgtacttctgcttgatcctcgttcgcttgtcccgatcagtcggagtctgtgaacggacacgcgccatgtcagatgcagcgtaccgtcagcgggcgaactgcacttactctgacgatcttgcatcccagataaaccaaattgttcaccgtgtcctgctcggagattgataatcgagcgtgctggaatagtcgttttcgatcctcgtccggcacaccgtcacggaacaagatgtagagagcgatcacgcggaccttgtccttgttcctgtattgcgaatcagaatcggttcctccgatcgctagtctcgacggaatacttacgacaccgcattgtctgccagcagcggtaccatctcttcaaccaacgatttcggtgtcttcccttcagccgtgactcccgttgcacaacactggccatgaggcaagaacgtcaataccaagtcatccttccggcgtctctgggtaccaacctgctcgatgtccgctgtttggggcagcttcttcttctcgaacagcgacatgcattcttgtgccatatccaagtgtaaggagaactgccaggacggagttataagctcgaccgttcccttgaaccaggttagtcacatcttaccttgtctcgcgtctcttgaaattccggcaagctggccaacatgtccttcatgtcgttgattcccactccgttctcactggaaagagtataattgtcaatcagctacacatatgggccaaacctcacgcgcgattcatcgccttaaactcacccagctcggaacccggcatgttcttgttgaaacttattgaaatcggccatgagcttgtcgatcgcctctttcatgtgcatgtgccggatctgcgtccaaatcttgtcctcttcggataagatgtcggtcctctcttccacaacccccattccggtcttgaccttgtgcctgcgaagcgggcagcgggttcagtacaccgttcatattctgcggacgtcttctacctacgtgtaggaagtgccgtcttgcacaggcaagaggtcattaaccatggcttgataggtaaattcgtgtaaaaacggagcgaccggatccattgatcggtcgaccacgaacaataccgatcgcggtcgatagttcatcgtaggctgtgatcgggccaaaacatgtcaactgagtaccttttaccattgagcactcaacctcatactgacaggaaactccgggttcagagttttgtaatcttccagatccttctggatctgcatggccagacgtttgggaatctggtctcccgtgtaagtaggtccggacgagcctccacctagagcctgtttccatcgaggtgtttgctgttgctgttgatcatcggggtgtccctttggcgctgaaggaccgccgtaaagcgaccctggtgttctagacacagagaggggtcccaaaggggcgtgatggtggggctgatagtatcggatgtagggattctctcccaaagtagctaacaggtttagaacctgctcgacgacttcgcagtcagcctgggctcggcgggaattagcgcagaaggcagtgcttacagctcggctagtcaagactacatcttcctcgaacctgtcttgtgccgcttcggatgctacgacccctccaggatttccatacaatgtgtaaaaattggaaggctgatcgacagagaagacttgagattcgagtgctaggatgatcaaacaggcaataggcgtcagtattcgtttcgaatgcgcggagacggccggttccacatgacgaacctcggaaattgcaatatagctccacgaaagattgcaggatgtcattcgggagaccagccgtcagacgctccgccaatttatcgtgaattcctgtgatgcaccttcaatatccgttcgccgtcgatcctcgagacgcttcaggactcaccatcgataaagtacaaatggacttgcttgtatgttctccttccatccgaaaagtcggccaatattcgattaacgttctgtgtggttggagtcaggaggtacacgacatcaaggctcggttgcgctgcccggggggacatgagcatctcgaccgctgttcacattccgttttagctcccgtactacgttatgcgaccagggtactttgacgggactcacccgtaatgttcatatgcaggatgtcgaacagcttgtacaccgactctaggagagctttcgaatgctcgtccacaacgagcaccttccatgttcccggcgatccacatagcagagccgtgctgatccctagagcaagacggcgtcgtcgcatcagaatcaaaagaatcgagattgggtcttgattgcttcacttctagacagtgacgtacgctctttcaacaatgcttgaagacccgttggcatttttcgatccgggaagtgatggctggtgatggtgaatgaagctcgatgacgctgagccttcgctgatccgtattaagatgccgagaagaaggatatggcgacggtacacaggtggagagccgtcctgaagtcggttccaagtcgcgtttaactaggtaagaggacttcaggtacgaggatggattgaacgggcgtttgcaggctgtgtacgtggttaatatcaagtttcgagtcgccaacggggaggtgttcgatgctatgtcggtcagctcgaagcagtgagcatcatcaccgctcacgcacccgggcggttggggtcctcgtacgtcctcgtcagaccacgtgacagtgacgagaatgacgtaacgacaacgaccgggaccgcctcaacctacttgaaacagtcatcttcttgtctgcatgtgcatgacgtcctcacatgcatgtttgctaatgatctactatggcttcgatggcaagcgtgagggtgagaaatagagacaacgaccctcacaagtcgtattctgaaccgatgtgaggaccgtcgccttctccccaacagccttgagacgataggaagagcctcgacgggatcacttgccaggaggacgtacaatttgcacaatccttccagtgatcgattggcaggtactgtcttcatcgccttcggtgcttgagacatcttgatgtgaagacaactcttctcaattgtccatcacctcacacctcgcaatatttgaagaagttcggcgtttcagatcagccggaaggtggagtgacagcgttaaagtccatccaattctcacctgaccgtccctgtaatacctttgacggggatacatatcgaccaggagaaggcaattgttgaggcggataatcgcgatttatctcagatctgccttgttacatacccccataaccgtgaccttctgcactctatcgcattgagtgacggaatcggtcgacgacctcatgatcggtcatcccatgttctgtatataatatgaaacatcttgttcttatgcatgcctaagctactatgtatacagtgtgattcgaagtgcagccttttgtcgaaatatacctatgtaattgttcttttattccgccatcgtctcgaaacggggcaagttcttctctttggcggtcatctttcggccaccctggttctcccctcgtcgaagtctcctcttgagcagcttccaaagttcggtgataacgagatagacgagaatcatgccgaaaatgataccccactcccaaccaatgtccaagacttggaaagcgtagtcggagatccggggaatgtaaatgatcgggaagacggtgagcgatagagcgaatgcggaccagaggagtagtttgttgtccaagaggttcatctggaagatactgagctcgagatgcttgcattcgagcgagtggaccatcaagagaatggtgagagtagcgaaggcggcggatcgaccgtggaagactgaatcgagaagaagacgattagcacacgtggtccaagctcgacctgacgcaatgcccgcggcggatgcttacggagttcacaactgtcgttgtatgcgccttcgttacagtcgacaccgaggtatccgttgcctcgaccccaaacgacgatgatgaactgtacgaaaagaggcgaggtcagttctgggtccttgaggtgacctcggagaaggtactgacgttgataagagtcagcgagccgattagaattccatatacaaacagatctagacaccaccacttggtgaagatggtcctgtaagccttgggcgtatggtccatggcatccttggcggtaggttccagaccgagcgcgagcgcgggaggcccggcggcaatggtgttgatccacaaggctgcgacgggactgagggggtattgcgagattccgttctcgttcttgaaagccaatccgataagcatgaccaggacttccgcgatatttccagagagcaagtagagcaagaacttggacaagttactgaacgtggcgcgtccctttcgaatagcacgcgtaatcgaagcaaagttatcgtcggcgaggacaatgtccgagacggacttggccacatcagaaccgttgagacccatcgcgactccaacgtcggctcgcttcaaagcgggtgagtcgttcactccatctccagtcatgacggcgaacctggtcatgccaaagacttttcgcctgtgtaacgcttcaaccattcggaccttggtttcaggagcgcatcgagcgatgacaacgggaagttcgggaagggcatcgatttcgtcttcagtgagcgaatcgaattgttgaccagtcatgacagcgccagtgccgtggctgtcgtcgagaatagcaacggaccgagcgatggcagaggcagtagcggggtgatctccagtcaacattcgggtggtgataccggcttgctgagcttccaatacagctccccgactctgaggtcgaggggggtcatagataccagccagaccgaggaaagacatgccggattcgagtacgtcacgaggcatagtcttgagctgctcgggacgcgattgaatgcgctttcctgacagacacagcactcgaagaccttcggcggcaagcgcgtccattcgagagatgatgttggccttctcagattcggtgagggggatcttgtcgtctccgagtccgatgaattcgcatcgatcgaggaccctctcgacggctcccttcaaaaaggcgatgcagccagactgagaagccgagccgtcgtcattgacatgttgccaaacagtggacattcgcttgatagtcgagtcaaaggggtgctcgacgaccagctcaaagtggccatcaacagggaccttgtgaataccggtcgatacggtcgagttgttgcgctgaagaggggcgtgcgattgcgttcgttctccgtgatgaggtcgcttggccttggtcatatgaggctttccacggcccatcttgtgagcccagacctgaagagcgacctcggtagcatcaccgttcgcttgccagtagccttctttgccgtgatggatggtcgacatgttgcacaaactggcgcaaagtaccatattctcgaggttctgttccatgtcgttggtggagacgacatcgggtccggaagtctcgtcatcgctctcgctgttaccgggaccactctcgtcgtcgtcttccgacggcgattcggtcataagaggcttgtcgttttcgatcgctcggacgactcctcgagggtagtaggggtcggaacccgtttcgacctcgtatgtctggccgatatcggtggcgaccttggcgggcttcatcgtagtgttttcggaactgtcacttccgggcaaacgagctgggatccaagcttttttcatgaccatctttccgaccgtcaaagtaccggtcttatcactgcagatgtcagtaacgacagcaagaccttcgatgctgtgatggcgacaagtggaagagtaagtcgtagcaattgattctcagggctcaaatcgacttacgcatccatccttcgcacaagtgcgtttcgcttggcgagctctcgactggcggtggcgagagtcagcgatacgacggcgatgagcgaagcgggtaggatggagacggcggtagcgacggcatactgcgtagaacaacaagtgtcttagtcagtcgggctcagcgtgagtcttcgagttgaactactcacggtggcgatcgaaggatcaatatctacgaatgcagtcgaagcgacgacgataatggcaaggatgattgcaatagccagcagcaaatatgcaattcggttcaatctgagaagccaccaaagttagtcacgtactcattgataatcccactacaatcgggtacccacttgatttgaagaggcgtggtttccctgagaccgagagcgaccaagaatttgtgccacttggccctccagcccctttcctttgttgtgacttttcgctcgatagcttcggcaatctttcctagttcagtgttcatggcggtcccgacaacgactgctcgagcacgacccttggtgatctgggatccagcatagaccatacagagacggtctccaatgggcatatcggcttgctcagaaatatcggagttcttggcgaccggcaacgattcaccggtcaagagggcttcgtcggtctcgaggttagagacggtgccttcaagaagacgaccgtcggcagcgacaattgatccgggagacatgagcatgacatcaccgggcacaacctcttcagctttgacctggatttccttgcctccgcggagacagacggcaacgggagctccaacgctggcaagagcagcaaccgtcttctcggctttccattcctgagtgagatgggcatgattgtggctgtcttagcctatgcatcctcgatcgccaaattgtcattaacgaaaagcggacttacctgcgagaacccgacgctgacgttcaaaatgacaagcgctgcaatgacacctgcggcgatccaatcctgtgtaccaaacgagacggccatggcggccaagaggacgattgtcatcgcattgacgatctgacgtccgagcaatttcaatggctgcaagcgaggatctaccgcatcagtaaccctgcctcggatcgtaagcgagtcgggccaagcctttcttccgctcgctcgtgcgcgagcggcgagcggcaagattggcccgagatctacaaccaatactgcgcactcactgaaggtttgggcggaggctggatgatgttatctccccatttttgcctcgcggcttcagcctgcttgccagataaaccgtgttcccgactggaaccaaactcctctagcacctgtttgtccgacatgatgtgcggcatcgacgagagacctggatgggacaggttaccccgcgcgggtgcggggttgctgggatccttcgtaggcttctccatcggacccggctgggcttgcgaagttgccgttgcttgcgaatccatggttttggtctcctggatggtggacatgttgcctgctttttcggaaaccatgatcaggggccagtgctctgttgttgtttgcttcggcaggggatttagtgtcaaagccaatccgtattatgagtttatgagctggcgattgctatctctttcaacaatcaagtgaacgagaagactttagagaaagagaagtggcgaagtcgacggcatttggcaccatcagtgtgatcttggcttgtcgaccatatatataatcatccagcctttcgccgcaacgagactccccgatatcccagtgcaatgacgccgtatcacttatcgcaaacaggcaaacgtccgcgtccctcaacccgaatagctcttggcatttcatgtcctgttgcagtcaggtcctcatgacctcctcacaaagctggcggagaagctatacccacctcaggtcacggcagaggaactacgaatgcgctcggtcgacggggcgaaagcgagagcggatgcagatcgtgcctcctgtccctcacgcctccttcatcatccggcgtcgtcggtaaagccttctctcacgcttgtagcggaatcttggcagctgcggagcgatacggcgaggggaccttttcgactccaacgatctcagcgaccggggctcgaccagtactcgacgtcatattgattgctacgagacgtatatgccaccggtctcttggagacgacgtaacacaaatcgagcactgaactaccatggctcgatagatgtgataggacagtccgccatgagacgcaccgaaacccgcacaatatggcaagatcggtatgtgccggtgcggtccgcctggccaagaagtctgtagacatgcatgttccgataaactagcgtgtgtcggccaagactcaactctgggcacggccaatgtagctgacgaatcttgccgcacacgacccaaagaggcgacggtatatattcatacaatgtatgatgtccgacttcgttctgacaagtaatagtggctatgtcgtccggagtcgacgcagtacggttcaaatattggctaggtcgcaggtcgcaggtcgcagatcaagacatgacgtctgtccagtcaaacttcctcttcgcgcggcctccttccgttcggttagcgacgctttccggatagtagtgctcccggtcttggctgttggccgcgcgtgacctcggcgatttcttttgcagccaaaagtttgatccacctagccggcaacgaaggtttcgaaacaggaggccagctccgggcggataaaaagctaagccgtttcgcttgtaagccggattctccttttgtctctgctctgtgatgacgcacacgagacgagtgagattgtccgccgtaccgtcggccgccaccgagactgaacgcgagtgatttttgatatcgcgacgaccaaaacggatggcgtgatgaaatcgatcgcggagtggcgcgagagccctgccatcacctaataaccacaacatctggacgtaggcagccctaccgacgatggaactcgcgacgcgcacggtgatagagcaatggggtcaagcggtcccgctaagcggcatatgactatatctttcgaggccgcatgaaatgcagtgacggagtcgagtgaaaagcgcaccatgccgggccgtgcttcgacaacgtttgaaagaatcctatcagtcgatcatcaagtcctcgtccggcatgtagtcttggagctgttcttcccactcttcgagctcgagtgttgcccgatagtattgcgagtgcaagatttcatgttgacctgtaggtgatatcagccatcaacgtcgacttcaatcgaggtaccgagagcagcacgagattcgcctttgacgcacctttcgcatactctcgacaggcccgccagacatgatccctaatgccttcttcaccttttcttgcctcgatcctcctcagagttgactgcgctgccccagccttgcttctgaataaaccctcaaggatctccatgctttgcatctcgacctgcgcctcatcgacgttctcgttctcgccaggttttgatgaacgggatatcgcctccaaagtttgtttcagcgtccttttaggctgatcggtacctccacaacagattcggacgacccgagtcagtttctctggtaagggagaattgacctgactcctgctgcctgtcggaagaggatcgtcgaattgtacgtgatgcgtctcgtccacccttagccccgcgcgatcgagcacggcctgtacgtctggtgggagactttgctgcattccaagcttgacggccgaagtgtcgtccgggttgttgggaatggcgaatccatacgccatcaaaagctcttcattacctatcattcataccgcatcaaaggcacgcagggtcggcgttcaggacgaacttatcatgagcggaccatgcttacctttcggtccatagttgttccacacttgttcaccgatctcgtacgatctccgtggaacgagaccgacctgtcctgcaccagtcttgcccgtccgacttgtccaactgacaggctccgctcgtcggtgattcagcaggtcaatcccgggtaacaagaacgggtaaggttcgtccgtctcgtctgcatccttcttgccaggcggaagctcgaaggttatccgatggtcttccagccgaagaagggacgaggggaaagaacgggatgtgatataagagttggctaatacccatctctccctacgtcagattcggggtcaggtcgcgcgctcgagcggggatataaccagaatcgaccagacctggactgaccagctgaaaacttctcttgactcttccaactctcccgtgcaaacgactttcattgcagcctgccactccgttttccacaagttttcccgctcggtgatcgcatgatacagattgctgccttcgagaagcgacctctcttgctggctccacaagagcggggtgaggaggtctgcccggccggggaggatgttgatgtagggtagatgggggagcttgagactgcgggtgatatcgattcgatcttgagacatcaggacaatacgatcgggaaatatttgatgaagctgtgagtactcacgcagaaggtatcgcttttgaatcatccttgccgattaagtggaggacaagataactcgagatccactgcctctcgtttagcgactcctcgtcatggttccgctcgagatttccttcgatcgagaccttggcttgctgatttgcttcaccttgcttcaaaccgttgtctccttttaactgggctccctcttgtgcggaaaggatgaagcaacgggaggatggttgggtgatagtgagtgcgaaaggacatgcaatcagagattcttcgtcgaccgagatagtgatatccattttggcgaggacgtgatagccaaaatccgaatctattccaacgcacagtatgccattcgatcgtcagcagatattcggtatgccagagctgaccatgagcagagaagtgggaactgaccgtgccttagctcgatcgaattcgaccatactccaccgttttgagtgagccagtcgatgaaattcagcgcttcttgttgctttgacatggtttagttcggcttcttctgccctagttctttctgatcagacggctgaatgagcgtgctgatggccttgagctcgatcgccgaattttgccaacgaaacaggtcaagttcggccacatccaacaattgaagtcgcgtcgcgtatgatcatgaatgacgcgttgaaactatttacttccgaaacctgctactacctgatgtaaatgaagttgatgatcatgtcgtttggctcgtcatcatgatgcatgatgatcatcaaatcgattaacgaagatacgatcaacagcatttgccagccattacacgcagagatccacgcccttctatcttatagcttatagctcccagatcaatcctcatacaagacaggatctacactacgataagctagctgtctcaatgtacaacggatgaaggagtcctgcgaccaacaatcccggcgatggagggggcaaaggtcacctttcgctggggcaggttccgtgattgatgaagccaaaggactgacccggaacgcacgtcaccccgaattctcaatcgaatgagacaatcttcatcatctcgtcatcaaatcgatacggtaccatgacggaatcctcggtcgtaacatcggtaaagacaaacaggtcgccaggtcgatggaggcagagacttggggaaaggacatcgtctctcgcagcatgacccgtcatttgggtcgaagaatgcactgaaatcgaccgtcacccattctcgtcaacgctgcaaggatggacgaccctccgatgccacccttgtggccgtcctcgagcgtgcgagaaccattctccacggctcctttcgattccatcctcggccacctcccgcttcgagaaacagatcggtatcgaattccatgtcaccatgaaaatagaggccacggacagctcggtactcgagttccagcgcccggacacgccgagcctgcctctcgattctcggtaggatactacgagacccattggttcggacctactagtcgcatcgaggacctccgcgcagcatcgacgtcgatgactctccatgacctgcctcaacatccttgtccaccccagtttcagtctcaatctcttcctcgacctcagattcaatccgcattgatgtccgggtgcatacggtccaaccccttgtcagccgcttccaactttgcttcatgggcgagagacttgccttctcctccagtccaatcttggcagcgaacgcaagggcaagctggaataggcgagctaagtagcacaggtggtacgatgggagcttgcggtgcgatgagcctctatcagacggcagctgggcaagaatcgggatcttatgcgggctggaagacggaccagagcgggtcgaagctaggagacctaccggacatggagttataccagaacatggttgaggagaaccgcgtatttactgaacgctcgctcatgaatacggcgatccccgctgtacctctggaccaattcacacagaccgtttcggatacggtaactccagatttactctcgtcggagcccctccctctggtcgatgctgtacacgcctcgactatggcgctcgcgcagagtcgtgccaacacgtcacccattgggcctttgatgacatcggtccctgcagcgcggccggtgcagtccaccgtccccgctcccgttattccagacaagcagaagcaaacgcgaaaaagggctgtcaagcgatctgcacgtcgaacccacgcttcggcgccctcgtctgcaccgtataatcagacagctttccgggcatacccctatcagtcttccgtggcccattctttgtcggaaccgcaagcaacgacgagatggaatgatgtgtccacgccaggcgtcttatttgctcaactaccggacacggcggaaacctcgtcactcgttcagctcgcaacccaatcgtctccgagtacctcgcgtaggtcgacacggcgcaacgtccacgagcgtcgtatcacccggacgaattataccgtcgacggaagagattgccttgatccctttccacacgggttgtatggttcaaagcgttggaagtcgaatgtggctgctgaatcacccggcaaccagggatccggccagactctcgtcatcgaaatcaacccctccgtgatacagccgaccgatgtacagtcgactgcaccctcgccaatctcgacgctgcaaagaggatgcgagacagaggaaccatctatgggcccctctagttcgcaggcagccggtgatcccgtcgtcgacgggcacttggtcacaatagcaccgtacttggacttgggagacttcatacaggagccgcttaaatgtaacgacgtgaccacacacaagacggaaatcgatacggccgatttgggcttcaccccgtccgaaaacatggtagatcattccgctgcttggaagcccacagcggatacgccaggcataggcactttacgcgaatgggaatcggacacaatgcctaggagttgggacgatccggctatgctttaccagttgaccatgctgcacgccagcaagggaaagggagagaaggtttccttcggcggcaagtcatctcgaagcccccttcaacaggcaacttgcagatgtgaccttcacatacctgatacagatctcgcctctgcatacatacaacagccaacagcgggtaccctttcacatgatttgagtgacctctcctcgcaagcgaatgcgaatccgacaccaggcggctcggtgctcgactcccagacggtgtcttccttctctcctggtagttggtctggagcagatgtatcggctgggtactggtctggagacgggaacacttttcctgagcacgtctccacgctaacggatgggtcgtcggtcgagacttcatggacctgtcccactccctggacgagagacaatacggatctctttcttcctcaatacggtccaaccgagatcagcctaaacactaatgctaaagggccgttcaatcccgacccgggcctactagtcggcaaggaggtcgagtacccggagatcttagggcttgacacctctctcatgttgctagacgagggcatttgtctggacccgtccttcatgaagcagtctgagcaagtaagaactgccatcccgcatgacattcactttaccgcgatctcatctccggttcgattcgacaccttggcgtttccaaatcaagactggaccgtgttcggcttcgctccgatccaaaacctgctgccaagtcatggaccgtcagtcgtgcatgctggtgcaacccattgtgttgaccgtgacatctggcctggatcgcctgctgcacgcgaatgcgccgagacgtcaacgacgacgaagtcccgcgtatgcatgaattgcaagacaacctggacgaaacaatggatggggggcccagccaacgaagttctttgcagcccttgcggcttagcttggcaacatgtgagccgcgtggagagctatctcgcacagaaaggattgctgacagcttggcccatagattggcgaccggcaacgagggaagcaagtgaatgttcatgacgagccgcaagattgtcaaggtgatcttggactgcatacgttcggtcagaaccgaaataatactgactgaactcgcggctgggcagaacacgatcccctaggagtggataccccgccacagtcaactcgtcaaggattctaccagatggacgaattctcttcccgaagcctgtcgcagaacacacggtacgcggcaccggtcgaaagcgaaaaacgcaatggtcctccgcttgccgacaaaacgaccccgcaaagaggaagttcagtcgcgaccccaaacctaatcccagctgttcgtatcagcagcagacgggctgcgcagccaccgggagctggggtacagccgcccagaggcggaaaagctctgccactcgccaaagctgaaggtcgggttgacagtctcgatcctatcgaagacgccaatcctatgatacgtggatccgccaaatcggctcctgccagcagtgtagctccagccaacccggaagacccgccggtcggcgcactaaggactcgggcaaagcgaagccgccccggcacctctgcgtctctagacaaacctgttccggcccccaaaaagcagagaaagaagaaggcaaccaaggcggaggacaacgatcaggaataccagccagccaaatcgaagtctgccacagcaaagcagtgagattgccatccaattgacgaaccgaacattcaaatacctagacgaattctttacggaccatacaaaaaactgcccaatttacttcgcttttgcacgtcctgttcgagcaaaagacaaatcgaccgagtttcgaattgtgttctgaattaaccgcggtttggagtcgatatatgcataggagcttcctcgagatacgagacggtggaaggtatcgatcaacacccagagctacaagggggacgtaagcagatgagaagaaagcatctaggttcggaagatgcggagaagtcgcgcctcagtgacaattctgcacgtatcgggcaagccaaaatcagcgcgatcacccttgcaagcttgagtctgctcatcttagaaccgaccttgtacggcacaacgggcattccttcgacgtactcatgaccagcttggagcagtcctggcacatgctcaaatgaccgcaatcgactacggccagttcggcatcctgatcttgacagacaacacacaggccgtccctttcgacagctggtggtgggcctttgggagggttttgtctaagttgctctgcagcgcgaggtagactaccgacagtatggtcctcctcatgcgatccgccttgttcctcagctgcttccgcttcctcctccttggcaagcctttctaggcgtttccgttcgaccttgatcaattcctgcactcgagtgatcaattctcccttttccagcacttgagcaaaatcgaccttgacgtggttctcgtacaaaatggccttgagcgtgccaatggagaggctggatatgtatgatagtggaaggggcaccagcgatatcagttccggaaccgggggtgacggcacacgcttcggggcgggcgctggccttgaagaagctgctgtgggacggggtgcttgttgaggcggtcgaggcgccgtgtatgggggtctggcttgagagccattcaccgaagggttctgaggtggaggtcggtaatgctgctgaggctgtagcggaggtctgggtgtctgaccttgacttgccacaggcgtcctggcacctgtcgtcggccctggcgccgtgcgaacagcaggattccgccgcgcagtatttgtggtcgccggatcaggtaggacaccttgtttaggcacagaacgtcttcgatagaagctctggctgacaagtttcagccctagctacgtagtattaagacctcatagactcacctctgatgcagctggcatgcaacccgatcgagggtctttagcctttaaaatgagctgaacgaaatcctccttctcgatggccgagacggcagcgggattcaggttataagccttgatgaattgttgaagcctcttgagcggcaaggatcgcaaatactgagcgtttccacaagcaactgtggggaagccaaggagacattgacaaagcgggctttgagtcgatctcgagtccactaggaaccccgtccgactaggaaccccgtccggcttaccttgtagcatggggtaacagaaatcgcatacttcggccatctcgtaacctccccctctgggacccactccgaccgaattggatcctggagcttgccttgctgcaagaccacgacgaggcatcaaagccgagtgatcggaacagtggtccgagcagtaagaatgtccgcagtgagaacagctatgagctttccggaaaatagggatgaagttcttgccgcaggtgcgacattctacgtcaggagaaaacgagaggaagaataaatgacggccagtcgcaatcgttgactgtgacaggcgtaccgtctgactccaccatgggtggagggccggagactattcagccaagcgtagcacgacggttagcatatgcccgcactacgatctcctcagattgatctcacgtatcggtaatcccatagacgctgtattgcttccaccagcagtcgttgaagaataaggattcgcagctgcaaagggagtttagatgaatcccgcttctcttgagtaccagcgaatgttgtaagagctgatgagcggtagctgcagctcacctcgctctccgaccgcatactcctcgttacctgcagtatcctttgctctcatatgatcttgaacagatcccggtgcggtctgggacattccagcggaaggttgaagtgggggaagatcgatcgatcgtccttgttcggaagccccatgcgagaggtcgtccgactcggtcgaccgcccaagtaacggctccctactgccatccattacgcagcgaaacttgagtgtatcttctccttcagttataggtgctggcgtctgcgaacggtcgagagacactgcgtgaatgacagatgttggacaattgtggacgggatgaagtcggggtcggagatgccctaaacccgttgccaccggcggccgtgagaatgcacgattgcgatcagcgatatccgagacagagtgatataatagctcgtggaacgtgctagtgcctctttattccaagataagaagtgcatgggtccgactgtgtcgattgagacggaagatgagttccgagacgggagacctatctggattgatcatcgtcctcatcattgctcatccaacgttcccggccggcgatgaacgacgcggggccccacaagcgcaagaccaggaatatggtccggcagaactttccagccgtttcaccgcaacaacctcgattgttaattcgacggtccatcaaggtagcacatccttgcaacaattagattctggtgacgagcttgcgccgtgcgccaatagctcaatgcatctgattcaccacaagtgactcgtacaggggatactgatgtagcacgcctcaattgcactacctgggcgaggcgcggcctctccgttttcaatccgggtatcctagtactacttgtaatcacgcaccgagcgaggtaccgtcagacttgacgatcatctcgcgtaagcctgctgccttgacgagtttccaccagaatcgcttccattccaatggatctccctagggtggtgcaaacgcacagcagtcagcatacatcggtgctcatcccgcgacagacgacgctgcttaccttgctcctgatgagctctaccagcgtcacctctcctggccatctcggatcatctctaaatttgacatcaccccttaacggttgtcttcggttatccagtaacgagacctgtacgaccgagtctgattcccgtacatggtccgggccaaggagttccagcaaaacctgcacgacggcttgaatcgtttgttcgatcgggaccgccaggcggaaccgagaaagtgtgttatacatgacctgagacccaccaagagtactctgatatcaccataagagggtggtcagtcgtacggtttttgtgacgttctcgatcagtacacgacctactgaaagccccgttgcttgcatgaactgggaatccatctgactgagctgactcgcatatacgtctccaccttgacctcgatatctgtgaagaggaattgctgggtctctgtgggttcatacggtatcaaagtgtgcgattgccgccgactcacggtatctgcgaccgctggggctcggctacatccatcataccagcttgacgaagacccttcgtcaattcgaacggaatattttgacggctgatctgacttggcctgttgggtttcggtgtgcatgagtcagctatctacgagctcgagatcagcgatgaacgtcagcttgcgaggacgtacgacatgagccagcggtgtgttttgatctgggggatggtgattcgcttggcgggatcgacctcgaggcaagccagtaacagcgctaagcgaggcattgctggcatcatgagcgagtgaacccaatccagttgtatagaacacgtacccagcgcatcatccgggatgttgttccacgggtcatactgtagcaactctccggttaagtatgctttgtattcaggactggccgtcgaaggctcgtcccaaggtgtgtctgagtccgggcgaggcttagtcaggtcatctgttcttgtgttgacacgatgtcgtcagactcactaccggccaagagcgtaaagaggactaccccagctccccaaatatcaatcggttctgcatgatacccacctgtggagttcagctgtagaccgtccgtgcccgtcgatgagtaacttcggtgaccaggaccgttgtactcgacccacctctggcgctacgtatggcagacttccacatctccctgtcaggagtctcgtcttcccctgatgtttccacaccgcacacagaccgaagtctgaaattttcaggtcacctgtatgcacgaaaaaatgccatcagccgatagttccggtggtctgtttgagtagatgactcgccatttgcgccgagcagcagattttccggtttgagatctcggtggcagatacctttcgaatgtatatgttcctacatcgttgaagccaagaaaaggtaaaccacagttgatcaaccccgattcttccggttgcagcggcttactagaccggagatcagctgggtgaagtacaacttcgctagctctgaatctactccgacatccggagctaagaagaagatacggatcgactcagaagctgtatttccatgtgttcccaccgagactgaccgatcttgtcaaacagatcgccgtgcgttgccagttccatcaacatgtaaagcccggggatgtagtcccgatgcccatgctgaaccattaaggagtccatgtactccaatatgtatttgctcttcagagacttgtgcaccgagacttccttctgtaaagctttaagatccaccgctggttttccattctgtgaccgcttcgggtcgggtagcgagaccaccttgcacgccgctacttggccgtatccgttcgactcgtgcttgtatgctcggaacacgcttcatagagggacgaaacattagtaattatagagcagcggttgatggtcgatttgacctacgtcgagaacccgcctcgacctattcgttcctgcacctcgaaacctcgaacctctgcatatcgcaatgggtgcggtacggattcttccattcgtgtatatatgcgccggacgtttcgacctctgaaacgaccgaagcaaagtgcaccttcctatagcgttcacctgatctatagtggcagctctaagacttagtcagactcacggcaggtacaagtaggtgatgaggagagagccatcctccttacgtctcttttaccttgagctagcatgcatagcgaggatgatcggatgatctcgacaaagtaaacaaacgacctaaaggtgatggtcgatgccctcggctcgacaactgtcgatgctgtactaactgttcttgtatgaccgtcataggtcggatctaccctgaattctgcagaaactggttggtgcgactgtcaaagcttgatcgtagatttagctacttgatttgccattaagagacggaaatggaagctaccggcatagagcttcacgctccggactctaccggtgtcgctgccctcagtaaggagcaattcccgtatgatgctttcatgggcaaatggcatgtcgtatggtcgacgctgccgctatggaatgttagtcccgggcagtacgagtgggggttccttggggacgctgataatgctctcctcgcagaacaagaaaggtgactcgactgtgaccgtcggcaaatcgcgtcactgatatcccgctccctcaagacgtcacgatcacatacaaacctctgccttcagatggagagaagaagcgattcgatgatctcgtcgagtaccgtaaacagagcgcctccagcgtttcggctccttcaacaggtcaatgaacctgcgacttggcgctagtgctgcacactgacagctatgctcgattttcatatatagtgctgggcgtcgatactctgaacacatcgtaggtcgatcgcaagatgcgactccggcggctacgagctcatcgcaatataattctgcagccccacgtcacacggagcagcctttgactggcgaggaaagggctggctgatgatcgccacatcgcactggcaagtgcttgggtacgatccagcgcgcgatcctcaatgggcagtcacctgtgcgccgcctgttctacgacgcagcacctaccctaaccacgccggctgaatctcttgcgcctccagacttttcgaagacgctgttcactccagcgggaatcgacatctacctcaggtctcccatcacgccggagaatcagcggctggtacaagacatcatctcgagattgggagacgttgccggagaaattggcacattgtcgaagtccggcttcttggtgggagagacgaatgacggtgactctgcgtgaggatggcgcgtgcagtgctcttgtcctgatagtatacagtgatctgtattacaatgatatgttgctgatcaggcatgtgcagttcatatttgctacaatgcggtacaaatccataataagcgtggactggtgccggtgacgagtcgggggatacagcttggatgtctcgaaggactggggcggcccatgtaagaggctatacagattagaggggggcgacattctctttcgcgatcgcatctggtggtactatcgctttgagaagggtaggtaatcggtctacccggatcaaaggtcgcgtaagtcaaagcattcgaacccgactcagaatcgcatggactcacagggcttagttatcactgtgttcatgcctgcatgtaatactttttcgatttgcttgtgtcaggcaggaaatcatcagcatagattctggattcccgacacccggtatgacttacttcaggtcgggcgttccctgtgcaacccacgatccaatatggcttggaccgacggtgctcgatctcggatttgcgcagataagctgcacattgaagaccgtccaagacaggcaagttgacatccagcaagatgcaatcgaacggagtacctgctacttcgctcgcctcaacgatttcctgacgaaacaagacgtctcaacatggtatcagagaaacgaccacctgaagaccggccactcaccaacgcttcctttccatcccccgccatcttgactttgtgtttgtacatcttgagctgtcgagctaaggtcttgcggttgatctcgttgtcgtcgacaacaagaatgtgcattagcccgacctggtcgccatctacaggttgtagaggagcgctcagggaccggctgacttcggttggtttgaccacggaagcggcacggatgaagaagcggaagacggatcccgtgggtacctccttggtggagaccgcttctatccgaccgccttgtagttcgcacagttgtttggcaataaaaagcccgagaccgttcccacccatctgtgtatgtacctcggtgttggcttgcgtgaactttttgaagagctttcccaactcatgtggcgtcatccctgggccggtatccgatacgctgacatagagccatactggatgcccatccggcagcggtgtccgaagtggctcaacgggaggtataattggggcttgctcgcctggtggctgcaagttgacctcgaccttgatcgttacctcgcgcttggcctgtaacgaggtgaacttgatcgcgttcgagcaaaggttgacaacgatctgctgtagccggctaggatccgctttgatcattggctttccaccaagcattttgagactgttgtccagtacgagcacaaggtccagatcctttgctttgcaatcggcttgaaacatccgatggatgcccctgttttcagtacggtcagctcaaccccatgatgttgcaaccattcgagtcgcattggcccacctcatttggcttcctagatcgaaaggcacaggtgtgacatcgagttggttcagctggatttgcgctagtcccaaaatgtcgttggcaaccctttccatttgattagcgctatcgatgatcgcatcgcacgcttcgatgtcttcttcgatcgaccgaaggttcgcttcactgacggtcgtgaagccatccttctgcaatgcgaggcggaaactactttcggtgagcatcagagagtgtcggatgagaagtgaggattgaagaattgggttgatcccgttcctcagttcatgggagacgcaatctaccaacagagcttgctgctccttttgatgtatcgcatccttcctcctctgctcggcttcttcgaccctttgatctgacagacgctgcatagctcgttccccttccacctcggcggtcacgtcgttgatgctgctgatgtaaggggcctcaccagaaagcatattcgatccgctgagaatggcgtcggttgtgacggtttttccgtttttcagactaatggcaacagagatgggaataatcagcggggttttcgaggtcagtccctggtccagactgaccgatggcgtgaacgtagtggtgacccggttcttatggatctatcggaagatctcgatcagccattgtggcagtttcacaaaagaaggctgttcccgctgctcactcttgccacgcatccgtcaagcgagccagatcgtcttcgtgaaccacttccgcccaattatccttgtctgtctctttcagatcgtggatggccaggaaagccttgttgacccagaccagagtgccatctcgcttggcaattgttaaaccggttggtgagatctctgccatactggccaacatatctcgttgctgttgcaacttctgattctttacattggcctcggccagctctcgattccgcttctccacttcttctgccgctgtccttgcttcagcctcgcgcttgacgagtccttcgatctcgttcagttcagcctgtttacgcctggtcgcatcggatatggttccgatcagcccgacaaacactccgtcttcgtcgtaatcacattgagttgtaaaattcgcccatgtcccatcgctccacataaaatccatgttggccacggcccttgtctccataagatcgccgacggtctgtagaagcaagctcatgtgttcgggagccacgcggtcgatccacgagtctagactctcgcctcgtttgacaccggttagctggtaccacatgtcgttgacccagatcagcttcgcggtggtgctggcgatgaccattccgataggggcaatctcagcaagtcgagcgagcacgcccggatctagattagcgggaagatccttcggacgatcgttgattgagtagtacgactccagaggttggccattattgcgtaaccctggactcgccagggtgggggtagtcattggctcgagaggaaaagcacatttgggtgctggcaactccgcctcggagtttccgggtgatctagtcggagatacagcctccggatatgttgaaggtgttaatgacttcggctccggcaacggtatattatactctgcagcctttcgctcgagctgttctggaatcccacatgtttccggtatgtaagaagccggactcgaagtagtcgggttcaaagtctgatcaatcgcaggcccagcgtcggactcatcatgaccagtccttggtacgtgcggctcggcaggatcctgcgtaacctggctcgactgcatacttgcagaggatccagacgacccggattctcccttctgcggtacaggcacagcccgagctctgtgcaagtctggcaggtccacagaccccggttgcgcccaaattccggtaagcaccaggatgtggccctcagccccggggcctggctcgctgggggataggggtagcacgttaaacgcccacttgattatctggaggttcccttcgccgcgtatactgagatcttgacgaggacttaatggtcgggaagatgacagtttgggtcggggtgaaccgagcggtagttggctcagaggcgatgcggctttattcactcgatcttgcttgttccggatcatcgacacggcctgtaacaaggtaacttcgacacgggccgatgcgccagagcttcgatccgatgatggatttgggtccttgtccgccgaccccgcggcatccttttggtttgcctgctgctgctgcctgtcgatctgttcgagataatgttgccacgcttcttcgacaccttgttttagacttggctgtgatgatccggcgacgcaataggcgaatggataatcacctaacgacgttcttgccgcagcattggcaaagaacggtcgctcgtccaagtcgtagccatggctatctggtatccgtcgacccgatgaaccgccgtgactggtagatggacggtaaacgacggcagggtatggcgaggtagagaggtaggcttgtaaaaggtctagattcgacatggagacgatcttgtcggccgtccgagagctagatcttgttgggcaggatgtccgaacggtgggtatcacttgaagacgtgccagccggctgtattgccgtctgaatgttcaagactcgacgtcgagctcgatggaccgatccacctcgttcgtacagaatagcagcccctggttaaatctttctcgtcgaccagagatgcacgagttgccagtcgatgcggaccccaccgaaatacggaattgaatcgatatctatcaagtatgaatgtatagccttgatcatggatagctggtatggtccagctcagatatgggaaatcacccctacctattttgacgattgtctgtccacctgtgcctcgccctggctcgaggaggtaccctgaggtcgccgatcagtactcgcgtctgcttattcacgctctccacccctcttcccctatggcctacctcgtgccgcccaccgactgtcgaactgtccagatatgcacatacagaccagcacgcacatcgtacaccgttccacctcgctgcgttcgtacccatcacttgttcccgaaagacagtcaccgggccatggacgaagaagcgatcaggcggagggcatcagcagcgtgtgccgaggtaccgagcagaaggaagcgagagcgtaaggcggcatctgattacagttccagcttgcaaagatcccgcgatcagtagtcttcggtacaaccaaggtttcacgggtgtgagaggacgtcgtcgtggatctctctggggcaggggactgcgcctggatccgaatgaacctgtagatcgatctggaggtatggatcaccggttccttcgatcgttccatcgctcgttagcccgtccaatctcagacgcacgcaaacacgaaggtgaacagcgagggggcatgggaatcactgcgcggcgccatcgtgaccggagtagttaatgaattaatatgaattacaaatgaaggagtagaactgatgcaggacgttcaatcttggaaggaggcggagggatttcctttggctgaccaggtcgagatccaatatatcgaggacccgcggaatcctgtactttgtgatccttgaatggatacaaatctgttccgtcaacgctgttggccgacaatagtctgggttccttcccgaattgctgaccagggtggatgaccttgaaaatccgcgttttcaatcctttcttgtggatcagttcagtagcgattcggactgcttggcaactagggcataatctaccgaatgtcatcgagtatgtaaaatcgcaagaaatctgacagctcgtcggtccggtgatacacacacgcgcgaatccgactgcaaagtgatcaaacttttgaacggtcgacattccggtctgccctacagaacgtgattcggacggttacaggtcgaacatcatcgtttcctgccctcagcgtattgtgatctagccttgatcggtgcgactgagttttgaacgcgcagaggacgtgagaatattgttattaaagcacacctgaagacaagccatttcccctcaacctctaggattctcaacggttcgaagccttcccggcgcaatagcggaaaacgtgcctcgaccgtactgccatgaaccgctcttttctaggtaaagtctggtcgtatcgcacttcgggacagctcggagatcaatctaataatctcgggtcggaaggttggcagtaatgaatgtttcatctaggtaccctcagtctctttttctctcaagagcacctcagcctcacagatatcgctccgcttacgcggctgaaaccgacgataaatctaggcctccactgcgaccttgccgtcaggatgagcttgacggtataccaaaagtctgtgaaatcttgagccgccaggaacgcgacgtcccgaggtattgctacaaggcacaggcgatgtagtcgaatggctattgtggacagaaagcctcgacgttgacgcgaggatgtctcgaattctccagatctccctcctccaattcctccaatgaaattgcgcgcaagctgaaaatgccggcatcgtcgccatgtttgtttgtacgcgtcgcccatctcatcctcatcgttctcctctttctctctcccgcttcctcccgagagcgaccaggtcatctcgacgtgatcatcaatatgcttaacggcacctactcagacttaccaaaataaatcctgcatagaccaagatcatccttaatctagcacttcgtcatgtctctcctctctcgaaccaccctccgcaccgcttccaggatcgccccctcggtcggcaggacccaagctaggaatgtccacttcgaaaacgtcgttggcaaggtcagtctagatccgatcctagctagacgagtatacgatggctcaaagtattctacggcatcgtcttgttgatctcacagaccatccctaccgacgtcaccaactctcccttcttggccatcaagatcgctgccttcttctgcgccggattcggaactcccttcgccatcgccgcttggcacttgtaagtcagagttttggcgacatgcgttcaaatcggagcagcggagcgagaggtgcgaagtcggggttaccgttaggagctgtcgctgttggacatccaggatcatacggccaggcagaagatagactcttgcgaatacgggcaacacaggatgacataacattcgccgtccgatggtcgatgccttcgcccctcgtcccagtcaccaacttgcaacgccatacgaacttgatacatcgttgcttgctcgctggaaagggcgagcctccggagggcagaagaatacgacctgtcgataacatcgaacgatcagaaagctgaccacttttccctgcattctccgccctttcacttgttatttccccctgacaacgcgaacacctggtcttcatccgtacgatgcatacggtcctgtatgataatcccctcgtttttcctgatccggcgcacaggaggaagtccggtggtggacccgcttaaatggatccatagaatggagtgggcaaggaggctgctctcatatcggtgatgatggtgtaaaagtgaattatgggttgcacgtcattatgcaaatgtagaacacccaagagtatggcgggacgtaggcgttctcccggtatgggcgactcagcggtgtcgtcagggcccctactgctcttttcgttcggctcttgccatcgcgatccggtcaatcgcttgtcggcttccgaaatcgtactattctagaccgccataccgcgactgattgagaggtgaaggtatggtgacgggcgtggtctcggctacgattgctacaagtccaagcaagagcgcaaccacattggcagctcggttacgttttcttgcatcgccttgagcttcgatctgcccggttgtgaattaaacgagcgggacgacaagactccatcatcccaatcgatcgaccgggattacaggccgcccgaacgcagtctgtccgtcaccactttgtgagctcgatgatcctcaattgttgtcgcagaacgataaggactgtacgtgtatgtggtcctgttacctcgattcgtccttccggtcactagattgtgttgcgtcctttgaacccccgataccagacatatatctaggtacttctcccccgtatctacccagctattcatcggctatcggcgctctttcgcagttcgtaaatctgtcgtcatatctgacagtgtgacctttcgaaacgggatcaaattcgtagaccaactcggtaccgtcagccggagcagctgtcgaccaactcgaagagttgtacatctcggtgctctcccaaacccagatacagctggaatagccgttttaccaccaaaagatgatcgaatcacaaggcttgaacgtaatcttgatatcatgactcaattgaaagtagcccttcgagggcaacccttattgctggatccgtccttgaacaaaggctcggcttttaccagaaaagaacgggaagagttcgggctggtggggatgttacccttacagtccaattctctggaggagcaacatgcccgagcgtacgaacagtaccaaaatcacaagtcggacttgggcaagaacacgttcctgcaaagtctcaaaggttggtttatcaaggacgtcttgcgggtggctttcccatatattgagacctgatagatttggtgtaatctctcaatccagcccagaactgggtcctgttctattcccttatacttcggcatttgaaggagatgttccctatcatctacacccgtaagtttctgctttcagaggtgtgtcatccggctcttgaacactggtggtcctatttttatgcgcctatgtattcgtagctacggaagcccaagcgatagccaactacagccatatattcagacgccctgaaggtatttggctctctcctgccgacgaggaccatatggaacagaccttgatcaacgctatgggcgggagagatttggatttgatcgtcgtatcagacggagaagctatcttgggttcgtcatcggctaggtgaagcagacaagcgtataccttgatacacctgctgaatgctttgctaccctcaatgacttactgacctttgaaatgagtaggtatcggtgatcagggctcaggagctattgggatcagcaggttcgccaaacagacacgatgcgagcaagatgacgaatctaacttggtcgttctcgagcagcgccaaagggatgatatataccctcgtcggtggcgttgatcctggaaagatcttgcctattgcgctggatgtgggcacgaataatcaggaccttctgaaggataatatgtatctggtgcgtgcagtgaagcaaatcgttcggcccgacatcggctgaacggtcatcactgaacgcagggatggtcgcacgatcggatccgtggtaaagcctattcagaattcctggaaaggtttgtcagcttgatcaagaaacatcaaccaagggctttattgcatttcgaagatttcggcgtcgataatgcgcaagctttgctcgacacttatcgtgatcagcacccaatcttcaatgacgatgtacagggaacaggggcagtgaccgtgagttgacctcgccaagggttaacggggtcgatccctcatcaagcgatattctctaacagcttgctacaatccaagcggctcttgctgtgacgaagactaagctctcggaacaaaggatcgtcagcttcggagccggttccgctggactcggtatcgcacgacagatacgagacgcggccattctcgatgggctccctgaagatgaggccaacaagctgattttcttggtagacaagcacggacttctcaagcaaggtatctcggacaaaatccgagagggggtcgacaagggtttcatccggcaggacaaagatgaggaggagatcggagaatggtccgagggagagaacgatctgttggaggtagtcaagagggtcaaacctactatactgattgggaccagcacagctgctggcgccttcgacgaagaaatcatcagagctatggctaagggttctgagagacccactatcttgccggtgaggcatctccgccctgctcctttgaacgatcaccacgttgatgtgtgagatgccacgtacagctctccaaccccacctccaaatgcgaagcagaccccgcggatatcatgaagtggactgacggcaaagccttgatagccacaggatcgccttacgatccagtcgacatgcccggttcgagcgacaagtatgaagtcgcagagtgcaataatgctcttgtgtatccggggctgggaacgggagcgatcgtgagcaaggccagcagggttacggacaagatgattgtcgccgcatgtaaagcgctcggaaatctcagtcccgcactgaaggatgccaagaagccattacttcccgatttcgcgggtgagcttttggtgggaacttagaatggtgccggttgcacgatttaatgaccagacactgtcattttagacgcactcgctgtcaatgagaaaatcgcactcgccgtcatcaagcaagccatcgatgaaggtgtctcggacttggatgttcccgaggacaggcttcgcgactatctacacagccgcatctggaaagccgagtacgccgaatatgtgtattccgacgatggtgtcggcttttgaggtgactactcggtactcgtgtaagcggagggttagaaatgtaaggccgctgccgtattagatgacgttctcgtatgccatggacgcaaatctcttcatgcgaagttacatgcctcatttgctttcgagtgatctgagacgtacatgcgatgcccttcgagacttgacgagtcagtccgactaaccaatccgtactgtgcttgcctgtactgtacttgcttgtactgtgcttgcttggggattcagggtggaccaagcgttcgaacgattccgtgctccaagttggccctttcagaaatccctcagcatgagaataaacccaggggcaaagagactggacaccgagagcaaacacatcgtaaccgttggccttgccgaacagagtgctgggtcgttttttggcaaccgtgtgagcgagtggtcacttgccgacgaggtggtgcaaccggcggctctgccggcagaggcggaagggggaaggggcagtgaggtgccggcgccacgaggtacagcatcggcggaacgatgagggaaccccgatcaccgaggtcggccaggtcgacgagtcgggagcgtggaagggtcatatcttgaccaaatcaccatgctgttcgactcgcggctgatgatacagaaagacccgcacgcatacatatatagcgtctgacggaggagtcagtggtagctactaggtagggcgttatcagtgagtatggcactgaccgcccgctaaatacaatccatcatctggcacttctgctacgcgccttgaacgcccgtcatgacgtcccccatgcgagtcctgatcagcggagcaggtgttgccggaccgacccttgcctggtggctgagcaaagccggggccaccgtgacaatcgtcgaacggagttcccgtctccttccccatggacagaacatcgatattcatgggacggccatcacggtcgccaacaagatgggattgatggacgagatcaggcggaacaataccacggaagagggtacacagttcatcggacccgacggacagcctttcggtctgatgcggatgaagcctggctcatcggctagtcccacgagcgagtacgagatcctgcgtggggacctcgccgccgtatttcatcgtgcggtcaaggatatgcccagggtcgatttcaggttcgggacgacggtcaaccgggtcatctcgaacgacgaagcgtccgtcaaggtggagcttagtgatggacaggtgggcgagtatgatcttctcgtggccgccgacggccagtggtcaaagttgaggaaagaatgcttcccggccgaggccatcgaggtgatcgattacaacctctttgtagcctactggaccatggcgagggaggccgaggacaatcagtactggaacatctatcaagggactggggcgagagtactacaactccgtcctgatccttacgggactatccgcgcagctatcacacacatgccctcgacgcccgagcagaggagggactgggaagaagcctcgaggtcgggggacaaggcgaggcaggccgacgtcctgaaacgagatttctctggggccggatggcaagcggagagactgttgaacgggatcgatggcgcgccagacttttactttcacccgattcaacagatcaggatgaaagagtggtccgccaaccgggtggtctgtctgggagataccgcgtgggctccgacccccctcacgggaagcgggaccacgctagctatcctgggcgggtatgtccttgctggagaactcgccaagctgtctcctggggaacatcccggtcgagcgttgaaagcgtacgatgaagcgttcaggccgttcgtccaagcgacgcagagcttccctgtctggcttccccgagtagtgcacccgaggtcgagctggcggcgatggttgacgcaagccgggttagcaacgatggtcagggtggtcacgcaaccttggatcatcaagtggatcgaccagccggcggataccgaggattacaagttgccagactacacgacattggaagaggttgctgcgtctgcttagcaatgaatgatttgatttcaaccaatcacgagctgtaggtatgcttttggaagatagatcttgtaaagtgaatgtcgagattcgatgtaaacgcaagcacgcaaccttgcatgggtatttgatttggttccgagtctacttccgagccccatagcggaatcaaattctgtcagttttctgttttctcgatcacgtgatttccagattttccctttcccgaggtgagtttgtccctttcgcctcggacgagcagagcaacctcgggaggaggtgagggctggggggaatacatcgttttcgcacatactatcccgataaactctctgcctgacctaccggcccaggatttatatctctctttctcgtcgacggccactctctagaacctcgccaaaagaaaagaaatacaacactcgctcaaccatgtccgtcaacggcctcaaggcgatcacgcccgttcccaacgtgaacgatttcctggacatcatcttgtcctcggtccagaggaagacccctacggtcatccacaagaacgtaagtcgtggaattgttgttacgaaggattctgccgttgagcgtctggctgatatcgtgacatgggctgcttcgccaccttgttatggatgatcatagttcaagatctcccgtatcaggaattgttagtgccgtttttgattttgaatcgtgccgggggggacctacgattcacctcgggcttgtcacgacctattgctaatcttcgtgcacttgatgttcaactacaacagtctacatgcgaaaggtcaagttcacccaggatcttttcgacatgaagctcggtggtatcctctccgagttccccatcctcgacgtgagtgcctctggcggatcgtcacgtcattccctctctaacctgcaaagtctactcatttccttgagatagaacctgcaccctttcctttcctccctcttgaacgtcttgtacgacaagaaccattacaagctcgccctcggtcagctcaacaccgcccgacacctgatcgaccaggtcggaaaggactatgtcaggttgttgaaattcggagacagcttgtacaggtgtaaacagctgaaaaaggccgccctcggaaggtcagtcgattcgagtccccctgctcgtctgttgcccctttctggcatgcatcctgacgcgtctacgattgaatcctaggatggccacgatcatgcgtcgtcaaaaagagcccttggcctacctcgaacaggtccgacagcacatctcgcgtctcccggctatcgaccccaacacgagaacgttgatcatctgcggataccccaacgtcggaaagagtagtttcatcaacaagattaccagggccgacgtcgatgtccagccggtaagtcggcctgcattgtcgccttcttccgcgatcaagggatgttgacatttactacggtgaccttcagtacgcgttcaccaccaagtcgttgttcgttggacacatggactaccgatacttgcgatggcaggtgatcgacactcccggtttgctgggtgagtccgggcacgtcgcatggttcttaggatgtctgactgattacatttgacgccgtccatagaccgacctttggaggaatttaccacgatcgagatgcagtctatcactgcccttgcccacttgcgttccgccgtcctctactttatggacatttcggagcagtgtggatacaccgtcgaggctcagtgcaagcttttccactccatcaagcccttgttcaacaacaagcccgtcatcctcgtcatcaacaagatcgacgtcttgcgattggatgaactcgctgccgagacccgcgtctttgtcgacgagatcatcaacttgcccgaggttacctgtgtccagacctcggcatacaccgaggagggtgtcgtcaacgtacgagacaaggcctgtgacgctctcttggcccaccgagtcgagcaaaagttgaggggaaaccgactcgaagccgtcgcaaacaagattcacgtcgccatgccttccaagcgagacgacgtcgagcgaccagctttcatccccgctgccgccatggccaagaagaagtacgacaaggaggacccggagaggatcaggctggagaaggacgacgagcaggagatgatgggcaagggaatctttacccaagacctccgcagtgagtcgattcgcaagattttgcacacggcatttctagcgtttgatactgatgcacactgctcattcgtgtagagggatggcttttggaggaccccgactggaagtacgacatccagcccgagctgttggacggaaagaacgttgccgactttatcgacccggatatcatggagaagctcgaggctttggagcgagaagaggagaagctcgaggccgagggattctaccagagcgacgacgaggagattgtcagtcgagtgctgtggcagattgaccttgcttcctgagctgatgttttgattcgcttgctctccctttcagatcggatcggacgaggaggagatcagggacgctgccaagcagattgccgagaagaaggctctgctcaagaagctgtcccagagcaagaacacgctcaagaaccgaccggtcttgccccgaaagacccagcacgtctcgctcaagcagttcaccaccggaatgaagcagatcggactcgaccccaagcatttggagaagagggccgagaagctcgtggccaaggagaaggaggcttacgaggccttcaaggctcagaacggtgccgacgagcaggatggtatggatgtggacgaggaggcggctggaccttctgccggtactagcaggtacaccggtaggagcagggccatcgctgaacgacgagctccccgaacggatcgacgaaccggaggtcttactacgtcgacggtaagccagacagatccgctatcaacagacaagcgtacacagatgactgacctggttcgcctcgcttcgatagcaaaccgccaaagccgacgagctcgagcgtcttggacgaaggcctgctgcattgtttggacgtgctggtgagggtgatcgtcacgtaccggacatgaagcccaaatgggtaagtcgcgacacgcctcgaccggatcatgcctgcgatcctgaccccgcatgtctaccatctcttctacacagcttttcagtggaaagaggaaggcgggaacgaacgaccgacgatagattgctgtgccttgtattttcccgactgtcatctcttttcgtgtacatggagctgtacgaatacgatcatctctgcgagaaacctgagcgctcgtgacgttgtcggatcggtcgaagctgagtgaagagtcgactcccgttgaaaccatcgatcatagactagcatttgaaaccacgtaaatgtgaagggtcagaaacgcccacatctcgtcatcgtcgctttcccccggaccacagcccaagataccaaagttgctgctgtcgaagcggtcctcaattccgagggcagtacggatagctctaagagttcggtgaggagtttgaaccaaaaatacttttgactttgttttaggagaatccggcgtcgagcagcaatcaattctttcgggttgaaactcgttccgctcgtttcactcgctgatgtgcccaagtgtttccaatttgcttctgaagcaggaatctataaaagacgccccctgggtgctgcgctatatcctgccagccagtaatgatttcgatagctgaggccgggtggcgatcgtgatcaagggcgaaatgtaataacatcctttcgccaatttgttcgatttcactgctgatcctgacctggtttgctgatggagtctcaaattcgggtccaaacctcttcgtgatacgccgagcggcgggtcgttctatggcctgcgggaactcgatactaacgaatgtatatggaggatctcgggaaagatatcgggccttttgctgtgagtgatgtggcccggccggcgcgagaactttgagcgggaaaataccattagtggtgcaggattgttgcaaccagtggagttgactgtgacggacaatcgagttctggtacctcctcaaggtcttatcgtggcagcgattgagctctcctgaaggcagtgcagtcatgggtgatcaggcatcatgcgagtcagcatgaagatagcacccacaagactggtcaggacgaatcgaatacctgacctgcatgacctgacagccagccgctcggatccttctcgcgtttcagatttgttcggcgttacccgacgatcaaatgtagacaaaagaacagagcgggtctcgggaaaacttaccttgatcacttataagtgccaagtccacatccagaaggaccccttgtatcacaagactcaccttcgatacccttgccgcacttacagtgatcatcatgaatgaaaatgagaacgtggcgggccccgcatcgatcaaacccgccgtccgaccatctttgaccaaaactcgcacgaccgaccgtcacctcagcttctctcctagcaataggagccagagaatcccaactgtaagtactctgaaagccagcccccctcaattcatcgccaattcctgtcgctgctgcaggcattcgctttgcgggattttccaagccactatctcatcccgcgtgaaggatgcgttctgcaaggtgtcgtcgaaatcagtaagcagatacagatccttaacggtattggtcttactgactcaaagcctttgttatcagctctagatcgttataactatgaggtgctgactgtgactcagggagggtcggcgcaaaagaagggtacatgcctatcctggtttcttgcagggttgcaactgaagtatcgctctcacttcagaatatcacgtcgtccatcgccatccagacattccagcatcgcagtacacatcgtggaggctggatgagggtaagttaagattagagggtctgatgcttcaaactcacattatctcctgaagcacaggatgtaggttcatcgagtccctaaatcttgatccgaaggttccgcccttcgccttgtttgaaactgtgatcgagggaggtcacgaaggagaagtggcgagtcgaattgataaagacgtgctgatttcaccgtgctgaccgagcatacctttgatacaggtatacacagctgtgccgttttctcacacaatcaaaacccgacagccaatcgacacaagccatttcttccctctcacccagatctgcggtaaatcaactttggcttacctgccaccaagacaatgcgatcgacgaatcagacatgggatcgcaggaaggatgacgaccaaaagagccgacatacccgtattctacaccttgggcacgagtgtagagctgtggggcagacggcacgaggtctgggcatactggctcaagctcggaaaaggggaggtccaggcgtatcatcacaatgtgagtgtcaaacctcaactccgtcagatatacaaagcttatactacgacagtctttggaagggccggcgaatgcactcagatgtgtatgcacgctcagtctgtttggagttacgatgcccgataagatcatcttgtggcagatgtgagtggttgcgcgtctcctcatttctgtttctcactgaattccaacgatccggctactcatgctgggatctcagtgatgatatggcacatctcccactggaaagtagcatgcaccgctttgaaatccttggcgagacgagagacttgatcgaaatttatcaggtgtcgtcggtgagttgagcaaaccctaggacgaggagtcgtttttatagccccctgcgttggatagcatctagtcgtattcgcttacaagggtgagtagtaaccagtaagtgcatgccatcttactaagcgggagataccccttgactctgctcagatcggttggttagataccacctcgcgaagatgctgctcgtacgtggaagcatctggacgacctgcattcaaggcaactgactgttcgtcgcaggaagagcagtactcgatcgaacttccgagacaacctaacgacatagtatttctcggagcatatgcctgtctcgtacatcccgagaagctagtgatcctggacctttcgaccggattggagtttcagctggtgacaaatcccgtgacggacggcaattttagggtgcttgatcacacgaaaggtggttcaggcagatgtgaaaggccatcgggaatgattctttctgccggacgagatggcgatccgcctaagtggtgagtgaaaaaggtgtaatgatgcaacatggccgactaatcggccggcccgatagtttcaaacttcaaatcttggaagaacctcacgtatcagctgatgcatcgggtgctgcctgtcttgccctgtagtcttcccgggacctcagtcggttcctccgattcgcctcttcggctccattcattatcgattttgcaattgcgtaggattaggaatatgacgattcgttcaacgggaactcaaaaagtcctgagatgttgttgttttcgcgctgcgagcatttccgcggaacaatgagaacagagtttacggggatgaaacgatgacgtgactcggtagcgggctcccgcccgaaccgggcaacccaaaggatgtttgggagggttgcgggagttgcaaagttggcttcctgactcctttgttctcgctgaacccgacgtatatatatacatcgctcaagatggcggtcatgttgcgagggattctcttgagctgctgcgcgatgattgcgcgactagcttgcgctgtcgactacacactatcatgtttgcaccgggaatgatgatgccgccaatgatgggtatgtccagcccagcagggatgatgccttttggtcggttcaacccacgagcgatgccaggatggttcgggcgagatctacttggtaagtcatgagctcttcgagaatatctaggctcgtcttgaacgggaaggtatcctgaacacaggcagggagttctcgggaccaggaggagcaggtgggtcctcggtacaagcagccgttgttgcgccggtctaacggtcgcatcatccggagcgctgcaggtcattccacggtgtgttgcaattgactataccaatatgtaacatctgctgatgtgccgctcgctatctcatagccgtaccgaccgccagatccatcagtcttgccgccgatgccaagcgggctccccatcatggctcgacgtgagtatgaaagcgtagacgatggcagtgtcgaaatgcttacgatcgaggcatggtgatgaatgtgacagctccaaaggagggattcgatgcatatggtcgcaggatcccaacgcctctaccagcgggtgaggattgagtatcctttttacgaagctatttcttccctcgctcacacccgtattctccggcgttatgacatcgtttaggaatggacggttggggtcggcccattcctgggcctgacggacaattttctttcaggccaccgggaatgatggggatgcccgggatgccaggagtgccgggtatgagtcagcctccgggaggacctgaacctcctgcccctacaccgacccctacacctgcgcaaaaaccggaaggagagccggctgctgatatcggcatcactagtgattctgggaggcccgaggagtaagccttcattagatcgaacaccgaatcgaaactcatctcttggaactattatcagaccaccaatgttccatcgatcccctgtcactgacaaccagaacgactaccgggacttcacccccttctccttcccctcatacgcgcttgctcgtatacatcgacttcgccgaccccccgagctaaaacattgtgacgtgcgctcagacgaatgggcatacttcattgaggcactcgagcaggaggcttaccgctatgcggacaaatcgcacctttcaacgtatggaatgtacagtcaagacgatctgccgttactgactgaggatgttcatcagttgctaaggtaagtcttacgcgaccggtcgatcgttctcgccaacgaagacctgaccccgagtccgattcagagcgtggcaagtcggctactttggcccccggggcgttcagatttaccctgccaaggacggcaaacgactgttcgctcccggactgccagtctccgggcacagggggtacggggataatccagctctgaccatcacagatgatgatgacgacagcgtgttctccgatgatacgttcgatccgagggaggaagcgcaatactctgctcgggagcggaaatatcgacggagacagagacgagaccacaggcgagagctgagagagcgtaggaagcgacagcgcctggccactgacgaatgggaggttcattttgcatggatgcaaccgacgtcttggcgagcgggcatgaaggtgcgctttaaaagtcagaagactgtcgcaatgaaggaggctaacgaaaccctcatcgatctgctcacagccgcttcaatacggcgaaaagcggcctgtggttccaaggccagtcgactactagtaatcatcgtgttgtatttctgccataaagggcctcgtataaatgccttcagatcacgtgttcatgtgcgttcagccgctatggtgtatcttcatggtatacagtttgtacctgggggcgcgtattcgccttacaattattgattgacgcaagatgagcgtgtcgttacatggatcccaagcaggatcgggggtcttgacagtcgttaagccgaatcaattgaggttgatatcgttgagcgcacagcacacggccgccctgcgaacaaaccgggattaagtcgggaaagagtcataacaagaaagtcccagaagacgtaccgatgatgtccgctgtattgtcgaacggttgcaccgctatgcagatcccacaatctcgctacgtgatctgatgatgccgtcacgaggtatgccgaatccgcactgaacgcggcatcccacacccatcgttgatgccccgacaagacccgctcaagtttgtaattgtaattttcggtagaccagatctttacggtcgtatctgccgagcatgtcgccaggagttttgaatcggggctcagcaaacaccttgtgaggtattttgggtgcgcgttgaacatggtgacgggttgcaggtcgacaagatcgttgccctgcctgattttccagacatacacgttcccctaagttggacaggaggcaattccgtgaggatatgtctttcgcgagtccgactggaaagtctgaccttgttgtttcctgctaccagagtcccgccgtcacctgctatgctcacgctccggattggcacatcctccgccggtacctagcgaagcgcaagaaacaaacgtgaagatcttgaaaagccaatacgagcacccttggtgctcaccaattcgtgcgtgcagctgtcttcacctagatcccaaatcttgacgctgccgttttggtcgcaggaaatcaattctccctgatttggatgtaccacgacgtcgttgacggccgaattgtgcgaatactctcgctgtgtccccgaagtcctatatggccatgaagccaatgtgagcattgcgcttcataggggtacagtttggagtccggacgtaccgcatatcccagatcttgatcgtgccatcctcactgcctgttgcaagccacttgccttcacaatggaaggctaccgctgtgacgttccccgtatggttttctagcgtagcaatctgcatcggcctcatgtcagccgagtttgtgtttcaccaagagcctggcatcacaacgcactgggttattgctattgcgatcttggatgtcatacagtctgtcgatgagaaggatatcgaattcctcaattcaggaagcggagatctttctcggacggaatatagctgaccgaactgcgttatgcccagcggctgccaagatccgcttgtctggggagatggctagccggttgacttgtttctgaatgtatagaatttagatcagcaagggtaggagactaatcgtcgagcaggcttcgagagcttacccaatgcggctgctggttgattgttctcgcacaaatcccactcagagcttcccaaaaccggatcgtatgatcgtctgaattgttaagattgggggattagtatctggccagcaagcaggacgagcgctctggaaccgctcacatccggccgtgacgaggatgacgctcatctcctcttgcgtatgctgcccagattgaccgccctgagacattgttgcaaagtcgcacctgaattcacgtgattattctataagctctggcgagtcgatgaagctctaatggtgtctaggccacaagcgagaagggctgatctatcagttcatcgtgaacgatatcgtcatttccaggaccggccatagctccggatggggttgacgcgataacgcatagatttgacgattggttccatgcgttatcacgttcccttgcagctagagcaatcgtttgttgacgattcgattcgacatgtcccttcgaccggtaaatctaccacactcaagccataacctacgctcccttctagcctttatgtgtcccgaataccacctttatcgtcatgactgctacactttcgaatggatctggtcccgctgccagtggctccttgcccaaggagacacgggtcggcgccggggggaaggagctaccggaattatacaagtaaggcatgcgtcagtgcgcatatcgatttcgacattttattgacaatgtagtcggtatgtacgatacagatccagcgggaacgagatgcaggatcgactggcgttcctacatatgctcgaacaactcaaggtaggtgttcaaagaccgccatactcgcgcataaagctacctgactgacttccatattccattggcacagatccaaaaacgatcaggttggatcagggagggcgtgcaacaacctgaaaggtaagcattatcgagacaaggaacggcctgatcggcgtctgactagatgccaccacatcgttccacagtgttgccgatcacatgtaccgtatggcgatgattgcgatggtgataccgaccaaaggcaccgaaaggccgcttaacattgggcgttgcgtgcaggtcagtcgcgcgtctcggagcgtcggtcaaccgcttgatagtcaaagctcacggccaaactcgcaattgattttggcttcagatggcgctcgtacatgatctcgcagaggctcatgtgggagatatcactcccgtcgagggcgtatcagccaacttgaagcaccaggttcgtaccctagctcgccccctcgcttgggtatacctgtctaacccaaaaattgacctgtatcctttttttttttttttttcagttggaagaggaagccatgcattcgtttatgcaggaaatgttgggtggagacggcaacaaggaagccagggataggatctggtccctgtgggaggtcagtcgcgcaacacgcccgctaggttgatagccttttctgatccgctctaccttacaggaatacgaagctcgagaaactccagagtccaagctggtcaaggatctcgatcgattggagttgattctgcaagctatcgaatatgagcggtgtgagttcggcatccagccaagagccagtcgtcgagcgatgttgaccattgatgcgactgtcttttcagctcaagacgtacggacacttgcgcctttcttcgctgggtcgatgcgtgagtttcgagcaaaccgcgacgcgtagcctgcaagctaatgagcgcctgtcgcctgcatctcagcccacctggaacaccctgcggtcagggaatgggctcaagcactattcgacgagcgacaagcgctttggacaagtcgaggtttgggagagcaagcgaaggaggaggttgggcatgtccgtataggagttcctactgacaaatgaacgagaccgcaaccgtaaccacgatagccgcgctcgcatttttctgatacccttgtatctatatatatatgcatgttcatgcggggcttcacaagtctaatctacctttttccgtactggagcgctcggcgctgtaccgcgcataacgaaatcgccgatgacgtagaggaaaacgttataagcgatgagtagcgaggcaatcgcaaagtgactgatagacgacccgatctcgagccaagagcctgtcgtcttcacctgacggaagaagaataggcaaattgctgcccagttgcaaagtaagtttgcattagcttgtgacgatacacaattcctcgaaatattctagactcacgttcactcatgaccagggtcaacagtatcagggcaaacggtggcagtcgctgtgtcgagcagatattcgcaaaggcagccgataggaggatgaaaggtacaatgatcttgtacatcaacaatgttgacatgatagcgggctggaacaccggaaccaatcggtagacaggagccaagtagaagctcctgcggtatttgatgaaagattaggcaggtttgtgatgcgaaactggtttgcaaagcttacgcgatactagcgacattccccgtgcagaagaagccctgcaaacagatgggcgaacggtcagtccgtgttgttaatcctccagcactgctacgtactgcgtgaactaggaaaaggaaagtcaatgctcttgccgcgtccgatgtttgaatgagtcgatatggtaccggagtagcagccctcggcgatgcctctgagttcatccagatggcaaccactatggcgtaattgacgaggaagagaatctcccatgattgcgaaaggaggaggtagctggccgaaaaggtattgtatagcagagctaagcgcaggtttgcgctctgccctgtcttgaacccggagaagagggggaagaggatcgaataggctgtaattgggtcttggtttcagtaacgctttcatacaaaattccaagcgggactgaccgagtagtatccaaccgatgccccgcatgagcggaccgataggctccttttggccgagattatttgcagcccagatcgcatagatcgacagagctccagagaaataaagttgaactccaaatgtccttttagctgcggcccaagcggggtcactcgacttgaaagtcttccagaagcaaaaggcgatgaatccatagttgacaatggcaccaatcgtactgcatcgcaaagcagtaacgcgatgttagaaaaggagccgaaaaggccggatgggcacactcacaggactcgcaagtcttcgtctctctcaactggcaagagagcccaaagcgcagcgctgaagaaaggaaaactctgtttgacgaactttcgaaagctaggttcgcctttgagtccagctctgacgccgaggggtagaaagcccaaacaccagacgatacggtgggtatagccagactgatgatgctcgactcggtgtcagtagtcaacaatgcgtatagacctgatcagttggactcacagccatggctacaagcgctgctgagtaaagtatgacctggaccaaccatttggcagtatgggcaatattatgcgtgcgtaatagtataccactagatccttcccacaggctgactgatattgccctgccgagatagatcgggaaggcggcgtagatggcatgccagggcgagcgttcggcgacagccccgactaaaaccaaagctgccgaggcgatggcaaggatatccagcggccatgtggatttaaggagagctttaccgctgctgttgacgccaaaagcgtgtcgcacataaagtaacgtgtatatgctgaacataatgtagcccaatgagacgacgatacgtagtctggattgatcgtacgtgtcatagtaggcgagtccacgaatggccaggcccgtgacatctcgagcgagctcactggcagcctggtactggcccttgttgatgagtccaacgatggaagagaccgcatcttctccatcggcggcgagcagcccggtgtaaggctgaaaacgcagttttcgggaggcaatttgtcctattgggaagcggtgttatcgatatattgcattgtcacacagccataaaggatatcgaactcactgtgcttggtaccaaactgttccacggcgccctttgcgttgccgagcatgagccgtgaccgagtccgatcggattcggttgtggaccgtatcaaatcgtccggcagtatcccgacactgtttttgggccaattgcctcctatcaatgcggccatcaacattgtcaagtcgacctgatccacatcccgccttttcaagtcggtgagattccaaggttgcgatactgaatcatgcgagctcggcaccgtgtcgagcagcggtagtctgacgcccgacccccaggcgacgtaaggtgtgcgtgtgttgtgcggatctagttggaaagtgggttgtcagttaagccgaagtcttgccaatgagagtcgtctttgactcacgtccgtccccatgatttccgatgttgctcatgccatgatcggctctggggcggcatgcaatagctagtcagccggattcgagacctttgtgatcgaccatggactttcgcttacgtgaatagatatgccgtcctctcgtcttgatagaatgaagacatctcttgttccaccttgcgtacaagctcgtcgacgtattgtatgttgcggatgtattcctggccataacggtcttggcttgtcagcacgtagccgactcaacacattcggcaaatgagaccgacctcggaatgcggtccgtagccatgacctgtagtgtcgagtccaagtagatgcaagaaaaagacagtgcccggtgctcgaagtcgctgcgctagcttgccgtcctcgctagcccgttgcaggagggaccgaaagtggtcgaacgagaaggcgtcgagccgggtagcgtctactggatagcatccgatcagtgtgatagtttgagaggctcgctgcaagccgatactgaccactggtgaagtcctcttcatcctcgtgatacatccacatcaagacccgacggtcagggtccagtggatcgtcttcacgcttgctgccaggtggatggcttccgaagatgggcaggatgtcgggagagccaaaggtgaacgccgtagacgattgattgaggatcgaatcaaaattcacggggttatgtttccagcctgtcggaagagtcatccatgggcttgtcagtcaggttaccttcacctccacctcctttggtattccataaagccgtgttcaatcgtctgctcaaactcgccgaggatcatccggtggccacctgcctcctcgggctctgggcaggcgtagggatcataggcaagggggtagggatacaggtcgataggaaggagaaggcgaggaagcgcaggttgggaaaggtcgtcgatgggttcatggtcgatgccgttcgtaagtctcgcctcccggtcgttcacaccgtccgagggtcgaaccgctcatcctcgtttcggctactttcggtaccatgtcacacttatccccggctttctccggacgacgtcccgtaccccaaacttcaaacttcaatgtccatacccgacccagtcatcctctcaccccccaataacccgctcctcctccccctcatcctcgtcctcctcaaagctcagtacgtcgttctcctaggccttaaagagctggaagaggtggaagcgctggaacggagcttgagagctctgagcgctagcgcgagtaccagtgtaaatgcgagcgcaagcgcagctgcgggttcaacgtcgggggcgaggtcgaggtcggctccacaaggtgcgggtcgaccgggcgggtcgggcagggatgggaaggaaacaagggagacgcgggtggatttgggagcgggggtttgggtaggcgtgttggatccggatgatgtgagtctcgtctcgtctcgtctctctggatagggtcgtcgggatcatcagcaacgacaccatgtccacaggctgatcctcctactctcccgggaaactcttcccacacagcccgcctcggtgcaagctttccatcggtctttgcacgcggcgttgaccaccagatatccatgcccatacccgctcgattcttcccatcgaaccccaacagcgagctcgatgggcgatgccaaacgaatgatgaacaaggatagatatgcccctctacccaaacatttaccgaggatcaggaacgtttggaacatgtacggactagctggaggagctgcacggtcgaccgtagcagacgagcaaggcgggacgaggtcaagggtaccacccatcccggccttgttgaaacccccagcatcttacgcatcgttcaccgcactcggaccgacttccatctcccaggatgatcctcgttcgaccatgacgacgaccaacgcttcggccggcggaaagaaaccgaccaagtcgggccaggcggacgaaccctccatcggactgtacacctttgtcccgacacgcactctatggcccttgccgagagagttcaacgggcaattggatacgctcgaaaacctcttgttgggcaggaacgccgtactagagtcgagtcactcggcgtggtcgaggtccaagtcgggaaaagagaggaaacggggcgagacgacgttggtgctcgggcggcacatcgaggtctacgtcggcgatatggcaggagcgctagacaccctggatctgaggaggttgagcaggaaacccgtcaggggcggtctgggcaccgtcaggtggtacgatcgacgccccttcagagaatttctgagggacgacagcgtttacgtgaggtacctcgctggagcgaggttaatgctcgacgtcgtggtcggctcggtgacctggccagcaagatacctgtggtccgggatctcggcgttgagacgcgagagcaagaggagggacgaatgggatgacgtagagaggacattgacgggcagcatgcggacacgctggaatgtgggcgcgttgggactcggaaagtccggtgagtgctcgtcgtccgttgtgatcaagctcggtagagggtctgactcgcgagctcgccgccctacagcaatctggccgtacataatggcgtcccttcttccaacccgggtgcttgccttgatactgaatcgcacacccatattgggcacactcccgccactcctacctcccgcacgttcgtttacaaacaaatccaccgccgacccgccaagctcgaccgcgagcgagaatacagactctgccccggcgtacgagacgcccaacctgagcgaagagacggggacgatgccgagtctggacgagagtttcatgagcagcgggacgactgaggaactgggcgcaagttgggtcggggtcggagagtcgaattgatggcgtttgcaaagacacagaggcaatcaaggtcgaaattgtataaagggaaatttgttgtagccacaatatcgaagcaaccactcgacagatcgaccagctagtatggtccgctctttcatcccgtccgatcgtcattcgttcattgcgatgttgtttctcggacgaggcaggatttcgcgcagtatcaagtggtcgtctcactctggtcagacagccataatactatgtttcccatgaggtcctcttggtgccgcaacggtactgagcatgctggagactttgggattcaatggggccccctcacttgttcccgtttggcgttgggctgtaattgaattgttgtgatcccctaatctttgtttgtgcctagccatttgctccatgaaaacaatagatcaagtcgcaattcccaaagcagattcctccatcctccaagacacagccgagaaaaatctcagaccgttacgattccaaccacgacgacaactttgacaggggcaatgaacacccggacgataggtaatcaattccgccgctcagcttcaacgagtgtcatcttatctcggacaacctcgccaatgaagatgcactgcggcaacgctatctctgatcaagaccgtgtcatagtcagtcacgaaagaaaaattacatgcacagcgcgatggacctggacacgcatagcggtgaatgtgaaatgtttgcatcatcgccgtcggtcatcatccttccttagactggttcctcatccgcccagttgctccatcgatgctccttcaaataccctgcccccatctcgtgccattccgcacgggtgactgctgcagctttggcctctgctgtccgtgaccactgggccattcccttccaagccgaagtctgagacgtccctggccagtcggtgacgatcctgagaggttcttggaagggcaagagcgccgtcaactcgcgctcgaggcgttgcggtaggttgggaattacggaagaccctccagtcacgtagattccctgcaggcaagcgagttagatttgagacgctctccatgccgattgattctatatttcgacccacctgcatcatccgtcgacgctcatccggggaaaacccgttcaaaagccacccggaaatttcagcaatcccagcgctgtccaccccggccatgctcgggtggaaccatgtctctggcactcgtatccgttcgacgttgagatggatttggtgtgcctggcccatgtcgtcagggtcgaatttctggtctgaccggacgaacgcgttgatgagagccgtttgtcgctggttctgcgccgccagcgtcatctcttggtcgaagaggggatcgtgctcgagcagtgcggcctcgaggttccgcacgtggtcctgatcatcggcttcggcttccgagtcctcgcctccgtcctgggccgccgctgaggtcagcataaaaattggtcatgaacaggggggtcaagctcacgatctccctgtataccgcccaatcctcgtcgtccgcaccgaaatcgtcctctgcaggagacaaacggatggttgagctctgttttgtgtcacgcccaccacaaactggccaccaaccttcgttaccctttttccgtcgcttgggtggcggctgatcgttggccaggttcgagattgtcttcatacgtgcctgcgctgctgcagtctttcgattggtcaaagcttggcgcttctttttacgctccttcatccggatgatagtggcctacggcacgtcgatgcgagttcagatgagtctctcacgttgtcgtcgcgaaatttgccgctaataacagctcaccgcatgatcctcccttaatcgcgccgcccacgcctccgggtttgccgctcgcgactcctcatccttgcgcttctcttcagcctgtccgtcggtgacaggtggactagtcaggcttgtcgcgtctgcatgcgctgaagaaggagcgcctactcaccaccctcgctctctcggcctttttctcagccttcatcctcatcctcgcgtcgtagttggactttaacaacttttgctttctcttttcctttttcccttcgtcgtcaagctggtcgtcggggacgtcaaccatggggaaagtctggatatcgtcctcctgtatcgtccattatggttagctgcgggtcaccgggccccaagtcgcgcgacgggggacgactcgcctcttcgtccgcttcgccgctacctttgtttgaacgcttgatcgcgctctcgatcgccttgattgccttttccaggtctgcatgggactccaagccttctgccgccaaggccgcctgcaaagttcagtctttgggtcaacgtggcgtcttgtacgattgtggcgggggctggcgttacctggtactctgccgcgctcattgtctccttgttggccttgagttctttatagatgcttatcgatctttccctttgtgcggcctggaagacggccggggatcagtcgacgagaaaacgacgttcctatcgaaatcgagcgggactcacattctcggcctttttcttggccgtctgttccctcaaccgatcgatcatgacattcttcctctcctgcgccgcggccaattgttcctcggtcttctggacgacctcttgctgtaaatgtccagcatcacgatagtacgacgatggtcgaaaagtaaagtaaagttcagttttgttcttctcggaggtcgacgggggtaaagaggttactgaccgtgccggtatgttcaaattggacgatcttgctcatcttggccatcttttccggatccgcgagggattcgacctcggtctcgtaatccaacgaaaagtaggccgtctcctggtacatgaactacagaatccgggtgatcgtctcatcgtcaggactcggcgactcggcgactcgatgtagcgggaactaccgtgagcgcggactcactgtagcctgggtaggtatcaccctggtaggaaagttggggtacttgagctgagccagcttgagcatcaattcggtcgcctgtgcgccgccccatgggatcctgttggtcgagcgaagtgtcgtttgggttcacgaaattggcaggggggtatgggaacgagttcaataggattctaggtcagcctcatgatccccttttctctccctctctcgtcacttcttccctctcatcctcgacggcctgctcaaagcgacacgtcgagaacgagcgcgagatcgagaacgagagagagatcgaccgagactggagactacagactgaccgtttagcccgatcgatgagtccccgcgaatcgagcacggggatgatcgtggtactatgatgacccatgttgatgaccagtccgtccgacgttccctttcccgttcccagtccgcccgcacccgcacttgcacccgtgctcgcacccgcacccgtgctagggcctgcgccgacccctcctcgcatccggtactcccaagcgaacaacccgtccaccccgaaacacacgctcgggacggaatacccttcgaacagcaattcagaggtgatccctcgggaatgaaggggagtgccgagtcgttcggtcatgatcaccggatggggtacgccggggagctcgacgccgagggaggagaggggttgggtcggtttggtgttgatacgggaacgagcggggttcgcgtggggaccggcatgggaggtggagttgccgatcgagttcagaatggggctgaattggcgtaagaacgacaacgagtaatccagcgccgtctccagtccatcagggttcaagaggaggtccccgtcccagacgctcttctgggccgctcgggacgaagccgagtgttcgaccgagtgtccatagttcaattgggtctgcgagtacttgttacggtatttggccgtctggttgggttcgacaatgtaggggttcgcgtgggatgcgaaaccggcgcgaaacgtgcaagagcctgggaagggacggcccggcgggagaggtaggtagaggcgtcaatgtgacacggtcaacgaaagaggtcgagcgtagcgtcagttcaaagggtctttgtgatagctagtagtgtaagaggacgtcgatgtgctcaccgttatcgatgatgaggtggtcgtctggcgagacgatagagaacccggatggatctcggacgacgggttcgtacgtcgtcgtcgtgtccttgacgtagaggtccgggccacgttgttgcgaggacgagggcgggctcgatgaggtggtcatgttcaacgactatgtaggtgttgggtgactttgatgtcagggggctgtatagactattgagtagagggtataggagggtatagttcgtatagtttaatgcatctgcatctgctcgctattgaggatcggatgctgatcggggatggcccaacgtcaataaataaatgatttacatggttgatgatgacacgtcatacggtggtaagattacgatacctatctgccactaccactaggtgttgttatcaattaattaccccgcactcccccccctcccctaacatcctctctcaagaatgctgtccctcacaaagattcaaaaccggagagacacacctagtgagcaggtggtggaccacgaccatcttgaggaaataaaccatcatcttattacaccctcaatccatataccccaacctcccacatcatcgtcttgctagtcaatccactcagataccccgccatccatccacctgaggactcctcacgccttacctccttcccccccctgccccgctcacaccagggaacctaccacagccagaggaaatttcggggccgacgaactccgggacgacgggactacgagcaggacctctctctcaagcacgcactcgccgggaaaaccccctctcatcacatctaatcgtatcgcagtcgatatagtggtggaaaggtgaacgtgaaacgaaaccgaaccgaaccgtgagcatcttttctccttttcgactgtctgtgaggtggggaggttttacgcgggaaagggaaagctggatggatgggcagctctcgtccacctcgacccgcgtttcgggccgatctccgacaagccggggatatatacacggacgacgactttgcagataaaaaacaggggggtgggagaaggaggaggatcttcgcttggaaagaaagaacagtcgaaagccgtcgagacggtggtacgaggagaggaggagagtccgtgcgtcgaagaacgttcttctttattcccgaccgacctcgcagcccatctttctggtcgggtgatgtgatgcgattctgccactgcgtcaaggagagaatacgaccggttcgacttttcaacgagaccgaggatgatgctcttggattcaaatgagatggagaaaaaggctgatcgatcctcaaccttgctcctccgtgatcccaatcatcttttccccctcgtcttcctgacaaccttttctgaaactccaatcatcgtctaattccccccgacggaaacgaaccggatcttcgcacacacccggtcaaaacctttgatatcgccattcctcttgggacgaacgttccctcgtcggatccaccatcgtcatcgcttgctcccccacccggaaaacaaaactttctcctctgtccggatagaaccccgaagcaggcccactagggacacacgaggaatagaaaggatcggacaggaaggatgcctcataatagtgggaacagcatcaagttgctcaccggtacgtctttgccctcctagtgagacggtggataggagaggagcgctcatccggccgaggtcctgttctgacatttcccgtaaacttcccgccccacgatgctctcgcgacacccccgtcgactcgccctactcacaggcaactcgcaccatcgactcgccgacgacgtcgccaaccgactcgggatcgccctgacgccatgcaacgtaggcaagttttccgccctcgagaccagcgttcagatcaactcgagcgtcagggacgaagacgtgttcatcctccaaagcccgagcccgcctgatatcaacgatcacttgatggaactactgatcctcgtcagcggtgagtcttttgcccccataggccctccccgggtgatgcgcaccggtcccctcacgaagctgacgttgacgtggacctggacgtggacgtggacgacgcgttcgtagcctgcaagacggcctcggcgaaacgaatcacggccgtcatcccttgctacccctatgccaggcaggacaagaaggacaagtccagagcgcccatcaccgccaagtgagtgttttcaaggcgtacacgacccctcccgcgcctgcccgttcagggagggggctagttgttgtcttcggatgcatgacgttgactttggtctcgtccaccagactcgtcgccaacctgctcgccgtggccgggtgtgatcacgtcatcaccatggatctgcacgcatcgcagattcaggggttctttgacattccctgtgacaacctcttgtccgagatggccatggtcgggtatatcaagaccgagatcgaaggttggagggacggcatcatcgtctcgcccgacgcgggtggggccaaacgagcgacggccttggccgatcgactcaacttggatttcgccctgatcaaccggaaacgaaaacgaggacaccatcacgccgccggaggtcagaaccggcctgggtatcaccataacaatgcgagtagcatgtcgggcatgttgagcagcttgacattgggtggcgccatgaccccgtacccggccggtacggtaccggggaccccgaccggtgcccatggacaagaggatcaacaacagcaacagtcccatcagcacagtagtctgccccagcgatccttgttctcgggaggaggtggcatgtcgaacagtttccacatgagcatgacctcgggaacgtcgtccgcaggaaccagcgggttgttcgtcgcccccggtacgcaagagtttgcagctgctgtcgcggcggccgcggctcatcaggccgacgaggacgatagaccggataacatggagttgctcgtcggtgacgtcaagggcaaggtgagtcggggggcgcgcgccaaggctcgtgttcaggttgtcgaacagttcgctaaagccgggcatgtgctcgtcgtagaccgccattctgatcgacgacatgatcgacaccggccacacggtcaagctcgccgctgaagtcttgaaagaagccggtgccaaggatatctacgtgttgatctgtcacggttcgtccgggttcgcccgaatcccaacagcgacctcgcagcgcagctgactcgaggtcattcgttcgatcaggactgttgtcggacgtcacgatgaagacgctgcgtgacctgcctattaaaaagttgatcgtgagtctttgatgtactgccttgccagacgcgaacgggacgctaatctcagctcgacatgcgtcaggtcaccaactcgatcgatcagactgcgagggtggaagcgaccgatggcaagatgggcaccatcgacatcgctcccctcattgctgagagtatcagacggacacacaacgggtgggttccagcgatgcgctcgtcagcgatggccttgcgactgattatctaccaaccatctcgcagtgaatccatctcggccttgttccgtgccgatcctctctacgtatgagatctctgcctcgacgtcaacgtttacatccgcaaaaatcaacaaccacaacaacaacaacgcattctctctccacgaaaacgaattggacacggacgctcccgcgatctcggttctcgcaagcatttcctccagaaggagcacaggtcgttgccgagttgacgggaaaaaaaggccgaggcttttattgtagaaaaaaaagtctgcccttgtcatctcgctcgcacgtctctcttgtgcctcaccctgtacattccctacaaccaattagacgaggatttcacacgaaataccgacgccgtcacatcgacctcgttctcgcttggttcatgcagtcgagcacgtatacatagatgcatccagattcaggaaaggccggtcgatgtccttttggtgtgacgtacatcggctcgactttcagaggccagggacctcgtcccaacccggagctatcatggtcgagtatagcagacgtcagcagagagactatccagacccgcggtgtcgacttgccgagaccgaacccgttgacgatgtcctcttcagagatcccgtggtccctgagcagtttgtacaggatctgagcgttatctatcggacggacccgtacgaatcttctgtcagtgctttgtcaagccgagagatgacggagagtgccatgtaaacgagtcagactgaccggtccaaaggacacaggcttccttggccgtacagatggcttctcttttgatctccatcttgatcgggtcggccgcgccgtaggcttcgagctcggatttcagatcagaggatgtctttgtgtgggcagcgagctgtgcgagtagcgtagtacgttccggctggaagttgagcatcgcgagtcgtcaacccaagtcatgaaaaggggcaatctcgtccggtccaccctgagcgaatgaaggtcgaatagctcacagtgtcctccctcccgcgaagagcgtcttgaagagcctgttcggcctcggtcaacttgagcgtcaaagcttgaagctcggcttgatccttctcgagcttggcggttttctgacagtgaggggttgtagggtagatggagggtgaagcgtgaagattgatgggacgatcagggggtgcgtcgcatgcaacgggaaaagatgggcgctcacgatggctcctgcggcagaggggaagctccaaaagtctaacctcccatcgatcgccggaaatatcagcttccatctcggtagaggatcgtgtagcatacgcaacaaaacgggattgctttcatacggttcgagaagaaccgtcccgatcgatgtagcagcgaaaaggcagagcgaaagcaaccacagctcggcggtcagacgacttacagttgctagtcccgatcttgtcaaagtcgaccagtccatcgcctttgaggtcgtcaaggacgtctttcacggattgttgtactgcaaagatgaacgagtcggggcgccaccatcaggcacatttaaagtcagatcctaccgagtggagtgcaagacgacggggactcgccgattcccttcgactctgtcgagtcaaggtaattcgtatggcaaccagcgaggtaagcgggggaacatgcacgctcgaggactggactgactaggagcaattttttcgagttctttgagttggtagaagtctttctacacatcatcggtctcatcaggtccgcttcgattgctgtctttcgaaacgcccgtgaaagccggggcaaaaaaaagacttactgtctcgtggaagatctccaacactagacagtagtgtactcagcaccgatggataatctggagtgagcctggatacagcgaaaggacccactcttgatctttttctcgtcgagcgagaggcctttcttggacatgatgggaatttgagctctcgcggctgttatgtgttgaggaatgaggagcgcgaatctgacacagggcgtaaatgaaaatcggatgcggagctgagaggttctcggttgcttaaccatatagcatgtatagatgagatcatgagatatgagggcgatctcgatgagtcttcgcctcattcggtgatcggtgatcgaaagatgagtgatcctcgtgatcgcatctgaaacagatggcaagtgacgtttagcgcgggttgatctttaattgatagctgatcgctgcattatatcttcatgacgtgtcaatatttgtgttatcgatcttataaaaccaacgtttcgaaagggcagtagtagtgtccctcgatcccaattgtctcgaagacactctactgaagctacgacatgacattcacaacccccacactcttctcaatcatctcacatcttcttggctagtctgttctgtcacgaaatagaaacgattcgcaacacacactcccgacctcattgattgagatctgtcaacccactcctcacgcagcacagcataggagaaaaaagtcattgaacaccaagtcgaccatagtcaccttgcaaacgcaaaacaacaacagctcttctcaacatgtccaccatcgaatcgcagtatgcgtgtaagtgttttccgaatatccagcagtctgagacggtttcaggtattaacgacgtgacctctctcgccgaaagtccgggcgcaaaagactataggactcgttaacggtgaccctagctacgaggcttcaccagatctgccctcgtaagccagctttagcctgctctttaagccgtaccggaaagcaagtaaagctgaccagcaaatcttcaccctctcatccgtatcgatctctcgtccgatcgctttgatactgaatctgccgcttcttaccgctgtgaccgaaatcggacaatctcgtagggaagcggcttcggcaaagaccttcaagtactcgcctacggggaagcagtttgcctatgttcaaggctcgacgtgagtctggctttcatcttcactgctgttccctcggtcgtatgtcttgtcacgacgatggctaatcttgacgtttgggtacctctccacaacccgtcctcgtgagcagaataaaggtcatcgccctcacctccccatcaacaaccgcctcctccacatcgacgtccaaccacactcgcacgctcgaagtccccaacgtcatcgacctggccttttctcccttgggcagctacctattcacctgggaacgcatgatcaaggtagacgatggtcaagccgggcacaggaatttgaaggtctggttcctgggtaaagagggcaaacatggacagggagccgggcagagcgaggaaggggagatcagggaggtcgccggattcgggcagaagaattacgatcaatggtgagtcccgctagaaagtcctgatgcagatgcccgtggtacgagtgggggaacgtgctcaaatcgagtgtctctgtgctttggctctgactcgaatgtcataggcaacccatggtcacggacgatgaatcccacatgatccgactctcgggtccatcagagatttccatctttgcactctccccgcccacctcgctcaaccctcttccagccgcaacggacgacctgaaatccatcgcagaggcattggggttgcacagccccgtctccaagattcgaaccgattcgaccatccggggactctttgtcggaccgagcaagaggttcgggacgggtcaatcggatgtggatccccttgccggaggcgtcggcgtgtggttgggagagtacaagggacaaccggcgagcgtcaacctgtacacgttgagggtgctgagggacgtagggaacggttcgttgcccgtcacccaggccagaaagagtttcttcaagggggacaaggtcgtgctcaagtggaacaagatcggatcaatggtgagtccccgctggcctgtgttctgtgcagagtccgaggcacttggagagggaggacggtcagctgacgtgtctcggttcgttctccttgcagggcctgttcctgaccacttcggacgtggacaattctggcaagtcgtattacggcgaaaccaacctctacctcgtcggtctgaacgggcagtttgaatgcaaggtcgccctcggtgagtctggtgacgcgccgacccggattgtcgcattaggcatagtgtccggtaggctgatagaaataccactttggccggtgcagacaaggaaggcccaatccatgattacgcttggaacccgaattcacgggaatttagcgtctgttacggatgtgagtcgggtcggttcaggctcatgcgttggacgtcgcgctgacgggctccggatcttcactcttcactctttcttgccagacatgcccgcccggacggtcctttttgacctcaaggcaaacccggttcactcgtttgagcccaaacctcgaaactttattgcctaccagcctcaaggccgattgttcctcaatgccgggttcggcaatttgacggggacgatcgatatttgggacttgaagtcgaggaaaaaggtgtccgagttccaagcacccaactcgaccacgtgcgagtggagtccggatggcaggtacatcctgacaggcacgttgagcccccgattgagggtcgataatggagtcaaagtctggtggtgtaccggaaaactcttgcacgtccagatgatcgaggaactttaccaggtgagtagtgtccgccacgacacggtgattaccacgatttggaagctgaaccctgatacggacctcgcagacatcgtggcgacccggtcccgtcgactcgttcccggctttcccgctcgagatgccctcggcacctgcccctcacacgagcgttgcccagttcacgccggccaacaagacgacggacgagaccagcaaaccggtcggtgcttaccgaccacccggtgcgagggggaccgctactccctcgatctacaagcgggaagacgagggtggagccgctgtcatgccgtccgccaacgggtctggagccgtctacgtccctggaacgaggacgcctcgctcgaggaacatccctggagccccacccggtgccgccaagcccaacggtaacgaaggtaaaggcaaaaagggtaaaaagggcggcgcagggaacgctactccggctgcctctgcgccttcgacccccgccgtcgaggtcccgcctcccatcgccgacggtgacgccgatgccacgcaaaagaagattcgaaacctgaacaaaaaggttcgtgagaggaactgtctgtctgaaggatgttgttccgacaatcggctgatgccgtcattttcctggatttctgtttgcagctgaaagctattgttgatctcaaggaacgcaagaccaagggcgaggtgctcgaggctactcaactcaagaagatcgagggcgagggagccatcctacaggaactcaagacgctcgagaacagcatcaagaagtagagcccgctcgttcggaccttaatcctttctcttcaacccgggacccttctcacgagcatcgatcgccccttgacgacgtctgatttcattcttgcatctttcacggatgtcattttcttgcacaaaacaaggcatggccatcccgacaaaagacccgaaaacatccggcttctctgcgcatgtcattagcatcgtgcatcttctcttgtagcagatattgtatcagggccgtgtgttattgccatgatccttgacgacgcattgttgatctcgacgagggtgatcgcgtcggtccggtccgcgttgcgtgcaaagagttatgacgaaagcaaagtcaccaaagtcgagcaacgggctgagaattacatgttcatgatgtacaacgcatggataactcttcacaactggctaactcgcacctggactcatctatactcagcctttagacattcgccatgcttatcaaacagtcttacaaggacgtcgagacgaccgccaatggcgtcaaggggacgatgcggatcatcattatcgaacccaacgtccccgaataccccgacgccaagtttcccggttgtgtgatcttcagcgaggtaagctcgatgtctttcaaatcctttcaggaatgttctattgagcgataatcgctcgaaacagatttaccaggtgtccggaccggtggagcggttcgctgggcagatcgcttctcagggctacatctgcgcttgcccttcgtccttccacgaattcgagggtccagagccattggcttatgataccgagggtacgattgagcggacgaacagtcgttgggtgacctcaagctcatgagacgatgataacaggcacggacaaggggaacaagtacaaggcggaaaagacgatcgccgggtatgacgaggtgagtctgtcatccaggtagcacaatggaccagatctcatcgagctgaatgacaacttttgaattcaggatgcgaccttgtctgtggacgtcttgatctccttgcctcagtgtaccggccgaattgcggctaccggcatgtgtctcggaggtcatctggtacgtcggcgtccatgcaatcgtgtcgtctgggaaggtctctgatttcgcgccacttttatctcaaacaggcgctgagggtgaggtgctcggtctgatcttgaccaagtcagaggaggacatggctcatcaaaattatctataggccgcctttgatcctcgaatcctcgctaccttttgctggttcgctaccgagtaagcaaccttgctgtgacggcttatatcctgtccagtcgactgacggacaccaagcaccctggtagcgtgcactcggctacgctgggcaagggtaattcggacgacaccctgatcaagatcaagaatggggatatggataacaagggagaggtcgccatggtcttcggcaagcaggtgagcgcatgcaatgccctcaggctcaaacacggtcgaggcgaacctgacaatgcgcttgctctcgtaggatacgcatgttcctcgagacggtagggaccttgtgcgcaagacgctcgaggacgccaacgtcatcttctcggtcagtcgcggatcaccctcgcactctcatcacttgtccgctgacaggatttctgcccgtaaaaaagctccacgagattcaggctcagcacgcctttatccgggacacatcttccaagggccgatgggacgctgcgttgactcgagggctgttcggcatgatgatggagatgtttgagcggtgtgtcgcaagagatctgggtagacgtgtcgtcgggggcagcaaggtcgagcatgtttgctaggcagtatcagctgcgccgcgacttgtagatcagtggcgaatgagtaggtgatagaaagagcgcatgcggtagcgtcggtcaaggtacaacgagcgagtccagagcacaggtcattcttctcacgctccacccgacaatggccgctccttccgagatcacctccatagcgctattggagcggtacagggggaagacgatctagtattgcctgcagtgattttgccttagccaagagggaccccacgacgactatgaaccccgctccgccggaacttcgagaacatccccctgcctcatcccgccggacccatcgtcgcatgatattggttgttcgttccaaccatacgggtgatacgtgactatttcgaatcgatcgctcgaccggtgcaacctgatctttgggtcgtcgctccgccaccccttcaaataatctcgacgaggtcgctcctcactctcgtgtcatcatgctgaaagcgccccgttttccacatcggattcatcgttccaggtctcagtactttccagctcacccggcttctcattcctcgtaaaacacgtccgtatactcgtcatgatatcgaacacgtcacaaggcaaacactcgtacaacgacagagctcgtccgtccctctccgaatatgaccgctgggagagaccacggcgcgccgcctcatcaatccctcttcaactctttcctcaccaaaaacaccctgcatcccttgcccactccacccatggccaacgctccaccgccctggacgtccaagtcctcggggtcttgctcctcgaccgtcatcccctcgggcaagacgccggcgactttttcaccgacgagatcgtccgacgctcgaccgggcgagaggataacgtagccctcgaggtaatcaccgacttcgatgtgacgctcagtcgctgacgagaacgaatcgacgaggatggagagcacggtagagagtgggtgggtcgatgggtcgaaaggcggttgaccgggagccggggtgtggttacggaagtagatctgcacgaccatgagcgatttccccacaacgtcagctcaaaagtgacaccctacccctgaatgcgtaccacacttcggcacgcacctggttgtctaggaagggctgtaacagactctgcgccgcccctgcagctcggcacgtctcccgctcgtaactccccacggggtcaaacgagtagaccgcacccgtcccgtcgtcctcctcgatccctgcgaggacgttgtacacgtagtaagggaacattcggcgggcgtagagcatggtctggataaggcgggcgatggatttgatgggcatctctttgttgtgggcgtgggtgtaccactgtacgagcgggaggccggattgcagggtgagaatgagtataggggaatgatgggaaaagatcaagcgagtgaaggacgattgatcgttagctctgaccgtcctagaatcacgatgaccaaagacgacaagctcggggaacgcacctcgagacgctgtttgacgcgtttgacaaagttgttaccgtccgcggcgaatccgttgacagcgaggatggctttgcttgtcctggagagtcgtcgaacatcatcaaggtcgtggtgcgatgatagatcggtcgataagagaaaagaacaaggagaggagaaggggttgttcagcatacgagacgtccatgctggaaccctccctttgaccgaggtcgaattcgagggcaagcggggggactcacaagggaaacaccttgcgctggtatctactctgaatcgagtaaccctcggattgacgggtgtctccagcgacgacggcaaagtctttcccggcgatggccaggatggaacctccgttcgaggagtaagggtcgaaccggctgtccgagcggattgatgggtcgtcgtcagctccggttgggcggacgacgagagtcccgtatatcagtcgacttactgttggatagccatgttttcagcgatgattgataggtttcgtggtataatctctatcgctatggcagtcggtacaccttctcataccaataacgacctcgaatctcttgatcgtcatcagttgcaacgacaaccaagcttacgcggcgaggggttgatgggtcgacacggacatcgataggtttattggattgggcggacattcgaacataaagtcatgtccgtgatattacgttatcacagctcacggacatggtagtcttgtctttgtcggtcatgtccgttttacgtgatcgtttcatcgtatcccatcgcttttgtctcttccgatcaagaataccgggtcagctaacatcatcatccatcatcaccttggaccgacctataccaatcctccccgcttgctgtctcttatcgcgatcaagcatgagtcaatcgactttcagttggggacaaggccctgtgcgaggagtcaacgtcggcggatggtcagtcggcagcattcaaaggaacccttgtgtatgagatatgttactgatcgtccgtcctttccttcgaactgcgtcgaacgagcaggttggtacttgaggtcagtatgtttgaatacccccaaggtgagaattaggtgaagctgagacctaattgcatgtgcatcgtgttgcattctccatgcgttcacggcaacatcgatagccgtggatcaaaccgagcatgttcgaacgcaagccccaatgggtgattgatgaactgtgagtaccagcggagaatgaccgcttcgtataggagaactcagaaatacgtagggctgagattttcttgctcgatctcttttcgcacgatgtctcacacgtccgctcatcctggtgcaaacgaaactcggctcggacggacatcctaaaacgacccttggcattctccattcgacataccttcatacggaccaacggtccaacaccccgcgtccggtataatcatacgatacaaaactctctcctttgacctaatctttccttgtaccatctcccatctacgatcattgatggattacgattccacgcaccacaggacatatggagcttactggaggtcgaccaattacacagccgggttcgaggagattgaaggtcattgggatacgtgagtaaggcttgcgtccttgatctggaagatgaagtggtgcgatgttggctctgagggataggggggcttggtcaaggaggtggcggtcgagttgggcggtagccggaccgatggaaagcgaaattcccgatggaagcttcttggataggacaaatatcaaaactgacgatggctaactcaaatccggtcatatggtgctccacgtattcgacatgctttcctcggctgggaacaacgccaatgaacgatactcaaatgatggtgggctcggtagttggatcgtcaagagggactttgaggatatgaaacgattaggattgaatgccgtgaggatacctatcgggtgtgagtctcgaggatcgatttatcattatgaacaaccgtcagtgctgatacacgtcgagttcaccttgcctcatctcctttgccgacattggtttccactattctgatactctgcaataccttcctcctattgatcttggacacgggatcgaaattttaacgttttgccatcagtctggtcgatcatccccctgggaccggatgagccattcatgacaggcgctttcgagtatctgcaacgcgctgtcacctggtgtcgagatctggggctcggcgtggtcagttcagtattttcacgctcggccaagtctaattagcggtagtgcttattagtcgacgcggaacagatgatcgatttgcacggggtcccgtccgggcagaatggattcgataactcgtaggttcctgacgaaagcgacacctgcgtgttcaagatcatcggttgaccgaccgttcaatctgtcctagaggccagaccaactcgagatcctggttcacgaacgcgacttcgctccagcggaccttgtcggccatcaccatcctcgcgcaggaattcacctcgcagacgtatgccgagacggtcatcgcgatcgagctcgtcaacgaacctctacctagaggagataccgaggtggaggcgttgagacgattctacgaagatggctacgggttgatcaggggttcgagcgggggcgtggccgtggtgatttccgaggcgttcagggggctgaaggaatgggaagggttcatgccgagcgatcgatatagcagggtggttctgaatacggtacgtgcgttcggcatacgtccagcgaggacaaagggctgagtgatgcacatcatccagcatatttactctatgtatgcaagtttccagcctaccaatctgctacgtgatacctgaccgaaaattgctgtgtaggtttacgatcgaactcgtcgagcaagggtacgcagacaagctacgaaccttttgtgacaagctgcccgagctggcgcagtccaatagcaacgtttggaccgtggtcggcgagttcaccaccgcttccaccgactgtgagactagaaggttcatccaagcatgcggcgtggtctcgctgactaaatccgaacggtatcacaggcgcagcgtacttgaatggccgaggaaaaggggcccgatgggactcgacgactgatccgtacgtccagatagccgattcgtcatgtcatccaatgtcaaacttaccatgcaagaccatctcgcacagcagtccgaccaacctgaccggcaactgtaaaggaaagacgggtccagccgcggatttctcgaacgagtatacggattacttggcgaggagcttcgagacacagacttgggtatacgaacaggcttccggatggttctactggtgagtctgcggaagtgactcgatcaccatcactgcagcgtgaaccctggaattacttcatatgctctaccaggtgctggaagacggaaagcgcaagcgagtgggcgtttcaggatggcgtgacatacggctggattccgcagcccttgtgggacaagccagcgactctagggtgagccggttggcagaagaataaagcctttagcggcaattgactcgtcaattactctttagccggccatgtcagttcgctgacactccgcccgtatttcaaaacgctgcgacattgcagctagactccgggcttgccaatcgcatacaattcttgcttctaatgggtttcttgatcacactgtatttctagtgcatagagtctctgtcagtcaattcagctgtatcgatcgttatgctatgtatagcagtcaaggaggcgctccatctacagaaacttggtttacaacgggtaatcggcgaaggtgttaattagcagaacaacatggcggaagagcgaaacgaatgcagggcctgagcctggcgggatcccgccatgcccaatatacaagcagaaaacaccacgaacaattgtccttgccttggttttctaaaacgcgtccctcctagcctccagttcgatatccttgttaaagaggaatccatccaagagcttgatccgaccgtccggtagcgtctcgtcgacgacacctggctgtcgactgtcggggcatggtacgcaccccggaccatgcatccaaatctcgtcccaaagagctggacccacccgagtcctctttgcagcgtctcgtgtcaacagccttgccacgaccttcttaacgccctcgctaccgacaccgacgggccacttgtagtctcccttggcgatggccatgatggatttcctcctctgggtttcttcatcacgcagggtcactgaagtcaaccggtcgaacggtaattcgccagtgacgagcgcaaacagaatgacgccgacggcccacgagtcggtgtccctcccgtcgtatggattgcccatgatgatttcgggggcggtgaacgattccgaaccacaacgcgtctgtaacatgggcgacgctgggtcgatgaaccgggcgagaccaaaatcggtgagcttgatcaagggggtgggtaacctgtcgatggggatcttggctgtaggatccatcttgtcaaccagggcaaaagggttgaccgtgaacatgatgtctatgaagcgaatcaaccggtgttagacgacttgtgtgactcgcttctgaacctgatatgactcactctcaagcttgagatcccgatggacgaccttggcctcgtgcagccagtgcacgcctcgacacagttccccgaatatccgtcggaccagatcttcccccatccgtcgatgattccccggcgtttgcaatagatcgaacagttctccgccagacaggttttcgaggacgaggcagtgatagtgtgtcgtggaaaacgaggataagtacgagacgatatgcggatgtgacaagtgctaaaccacgtgtcgggaggatcaagtcagctgagtcgttccccgatgatgctacagaactcgaccgtgaactcacccgcaggacagcgacttctctaacgaaactgatcctcgtcctatcgttctctctgcacatccgtttatccatcatcttgatcgcgaccaccccgacacccccttcgatcggagagtaatccgcgtcgtcctcgttctctccttctcccgcttgcacttcctgccccggccgactggtttgggggaccagcaacgtcgacctggatctcgatcgacggggaaaacgagtcacttccctcgcgctccagacaagactgaacgctccttcacccatcacctggtcgaccttccagtacctggatccacctcgcgatcgattcccaaaagcattcgccccctcgatgggcgatccgggctgagcgagacggggtacagattcaccctcgggtgcgacgaggacgtccccgggtttgacgacccggcatgattgatcttcctggacgatgggtcggggtccaaacgtcccggatacctcccgcgtcagtttccgaggagggctgatcaccgtcgcagggtcataagccgggaatagggaagtgtgcgatgtaccagacgagaagccgtcgacggaatcttgtcggcttcgatcgggggggattcccgagatgaaactccctcgtatcgaattcgatgactctgccgattgtcttgaaggggtagaaatatggggaacgggcatcgtcacggaccgcggtgattccttgcccgagggagaaccggagagtcctcgtcccaaccctagagcgaagccggaagccgtcatatccttcctcggcccgctcgaagggaaaataggagacgggctcgaactcctcggtggagtcgcagcaaaactggtcgaaaagaatgcgctcgatcgggaactaggcgtttgatcttgcgtagaagattgtcgttggtgctgatgttgataagtggcttgacctgggcgggcggcagagttgagagaacgagcccggttcaaattggagctggaggcttccaggtgaggtctctccgagggcaggaagtggtgtgtgctacgtgatgtcgagaggacagggaacgtcgaggccggtcgaggtggggaggaaggaatgttgacgaaagcgctcggggccaaggtcgacgatggtcccggaatcgaagacctcgtgtcggtcatccctatcgacggctctgcgagcggtcgaggcggtgcaggcagatccagactgaaactggtcgagaagaaggccgacgtcttgctgctcgccgcaccgtccttagtcgagcccgaatccgtgggcgaagtggcctgactcggacgtccctgtgcttgctgcggtgtggaaggggtcacgattggttcctgcggatctcggtcgagcactcccgattctttgggtggggatcgaccgagtggatcgacgccttgatggtccgtcggcacaggactgggcaaaggttgcggactgggccagcctacgacccccgtcgtctccagatcgatgctgggtcgagaggacgagccagaaatggaaactgcaggtttcgtgatggattccagtcgttccctgtcaaaggtcgatcggaggtgaggagatgtggctcggatctctgcagggtcggacaccgtcgccgatcggttcctcgacaaagcaggtggtatgatggtaggtgaagctttcaacatctcgatttgatcgtaatcgagacgttgctgctgtggtacatgctcgaccttgtcacccggaccggatcgtcgaggtaggttgaggtagagtctcgctgccgacaagtgggacgaaggtggccggggcgaggacacttcgagattgatgacctcgcttgacccgaagccgttcaatccttggagctgctgatgactgaaaggtgaaccggatgtcatggccggtgggagttgatcggtcccgagaaccatcgaggtgagggtatatcggacttgacccgcaggggatcgggatccgtcctggcaaacggcgccgtcttgggtgttcctcttcaggtggggtacccaacagctactcctatagtgcagactagtatcctgattagttcttcgtggcagtgagaatgatgtgagggcaagtaacagtgttcgacgagattaggatggattttgttcgaaacccgtcaccttctccgacctttgacgcggtcaaagaggggaagaaacagaagtcgaatacaagttcgacctcgttgaaatcctcaattcgggccaaatgtcatcgacctgtcatccaatcagctagatataattactctgaccgtcctctccgtcatcgtcatccccatcccgaattgactggctgtcaagacggtcctcttgcgatgaccgctgccaacggttggaacaagatccagacggaccaggatttatcgagctttcgtcagagtcctggatatgccgatttcatcagttggatacaaaggcgatccgagagtgtccgaggtagacggatagaaagaggatcagaaggatgctcagaggtgtgttacagctaagcctcgagcgatatcgtcaccgaaggaccaccgcgctgatcagagaccacctatccgtctgttcaaccttttaccgttcgtctcgcctgcgacgacgtcgggaagaaaatcaaatccatcttggatctactagatgagctgacccggctcgcagacgagaccccggccttgcacgatccgaatcagaggtttgggaacaaggcgttcaagacgtttataagcaaggctaccaggtacctgatggacgaccctctcgacgacaccgcaatgactggcgatgaacggcaggcgaagacatcgacctttctgactacgtgcccggaacacgtcaggaaggacgttctggagctctggatcggagggcacgcttgggggcacgaaaccaggttggattatgggacgggccacgagttggcgttcgtcctcgggctatgggtcttggtgaaaaggggttggatcgcggccgggtccgacgtcgaactcgacaagggggaagacgaggaggatgatttggtactaagggtcttccctaggtgtgtacaagccgtgataacagtgtttcacgaaatgtgacgtgtgacttgaacttcctcctgacgctcgacatcgaacaggtacttgacgctgaccaatacgctccagaccaagtacaaactcgaacccgccggttcgcacggcgtctgggggttggacgattacgtctttttaccctacctcttcggatccggtcaattgctcggtgggtacagtaccgcacacatcgggggacgtcctgtcgggatcagcatatggtgtgatactgataaccagggctttacaggcgtcgaggggatgaccccgggcaagactgtggatctcgccaagggtaaggaagaggtcgacgatatgtggaccgaggccctgcgtaggctcttccagttcaaacgaggtccatttttcgaacactcggtgagcagacccccgtccccgcatcttccttgtcgtcaagctcgttctcaccccagtgccgaaaccatgtgctccgaccttcctagccactgctgcataacctgtccacctcgttcccgaatttcagcaagatccactcgggcttgttcaagatgtacctggaagaggtcttagggaaacgggtcgtcgtacagcatcttccccttcccacatgggtatgggaacgggaacagaaagggtgatgcggctgtggccgtgggcctggttgtggccgtgatgcggatggtgtagccgccgacaaggagagccgacgtcgatggcctcgtgatgtaaaagagctcacaagggttcacatggaaatacgcttcgtatcgttgtatagatcccccgattagagggcgttccggagggtcatgggaatgataataatccggccgacatcatcattacaatactcgacatcgcatcccgcagatggctccccgagtatactgcgagcctgtcagatccgccccgggtcatgcccagagaggatctggagtccatactcgcaaagatcgtcctgcaaaggaagttccacaatacaacaggcctgtctgtcccttcggaagctcgagactcagtatgatgatgctctaggagagtccaatgacttgtcaacagcagtcttctaatacccagccgagaaggtcaggacttccctcagaggaagccgctcagtgtggcgacatggcgtataccagaatagagagacatgcttcgtggacgccctgtacggaataggatgtatctccgtcgattacagatcatccgatcccgggctagcttacatcaccccgagcgagccgagtggattatccgtgtgtatgggaactgttttataaccaagtcggacgatctaccggacgggatcacggggagtgcttgttcatacgatcgctaagacttcctactactgactactgaactcatcgctgcgatggaatgtttggaccgatcttgggcgcgtccttcgagataccgagagcgagtggaggaggttcacagagacatttctgcccctgctcgataggggatcatccggtaagtgactctcatctattttccagcgtcaaagatgacgatataacgcacctgctcgcgactggcgtaggtgtctaacgagacaggggccgtcgccaagggaacgccgcggggaattgtttttgatataggctgagtcggatagttctcctcgtaagcgagcgcatgcccgacacaatcggggaatctcgtcgtacttctttcattgcgcttgtgtaaaaacagaataaattagcaatcgttccccgcccccgcccgagcgtcgttgataagtttgccatcccagacactccgacttgaatcgatccccgtctgcttcgaggtcctcctgtatttccctgcgttatcgaaccacccggtacaccattttgcgaatcattgccggtcgcagactgtctctttacgagcctgctcaactcggtcgctgctgtgaggacgttctcatcccaacccgtgaagcccggttggggagtggcaggccctactggtcgaagcagggagtggcgaatccgatctgaatgacacgagatgagaagggcaggaatgttcgacctcctctaagagatagctgccgctgtgtgtgtgatcgtgattctcgacggatcgacgatgaaacatgcgtggaacgaggcgcgcgtaaagtaaagagctatgacagggcagggggagaagggtgtgtgtgtggtgtatccgcggttcacgaaatcagaattagacattcccgcgcgctaaatttaggaaattctcgagatcagcggcataggcagaggcgagcaaggaactgcgtgggccccgagagtcaggctagctagtggtagtagtcatcgaaggtagtagtcgtcgccatcgtcgaaatgaccttgcttgcccaatcattcacatccatcgcatgcagtcctatgtacagagggaaacgtttgatcatcagaaggtatctactaagctttgaatcttgatcagagtggcaagtgaggaaagtcgcgagtcgccagtcgccagttgcacccctttagcctagcccagcctgttcgtgtgtgtcctagtcctgtctctcgcgtcatccatccttagcctagctagcttgttggctatttcccatctccggcctaaaagccagctgccacaccacatccatccattcatcccatcaatccataacaactatcaccaccaccacgttcacaacctccgtatcactcttcagaagacatacaacccaattagaactagtcgtacatcatgtcggcgagaacaggggttaacgtgtgagtcctaagcctcaccccgtggatctcagcatcggcggcggcggcaggcagaagagggcacaagtaggaagatgctgatcaagcgtgatcattttatgatatccctttccgacctccctctctctctctctctttgacttctttcttcttcttctttcatcctggatcacataatacgactcgactcgactcgacgctggtcttaccctcgggatccctatcgctatcgcctcgaacacggacgatatacgcgggccgggggggtcatgtcgttcgtgttcactgaccctgaccctgacatcgatttggactcggatcgtgacctggacttgaacctggacctggactcgaactcgaaatcgaaatcgaatgcgggatccctggacacccgatcgtaacgggtcgattgtggatcgggtccgggactccatctcaacgtctttttctgacttcgtgaatgcacgatcacttcgggaaatccgtggtgatgctcggatggctcggatcgacgggttttcgattgtgaacgtgtgcggggtactcgacgacgtgaacccggatttcattcgactcgactcgactcgttggtctgcccgcgaaaccacggaccatgatgatgaaaacgatctcgactttcgatcgggtacggggcaactatagcaacaagacgatccggttgacgggtgagtggctggggacgtccgactgcgctctgtgacccgattcgttggactcctgtgctcgtcgctcgagagacttcgaatgcgggagggcggcgtggagtgcgtgaaaaggcaataagggaagaaaggctaatcccgattcaattcgcatctcttgtctcttcttcactgcaccgatctgctgggtctcgaccctactctacactctggtcgactcgtctcgtctcgcctcgcctcgcctcggctcgggctccaccagtcgtcgcggccgactcgctcgtcaagcgcgacgtctttcgtctccccgacccgttcgccgtcatcacggtcgatggcgaacaaacccacacgacgagcgtcatcaagaagacactaaacccgtactggaacgaaaactttgacatgtgagtcgatactcggggcgtcacgccggcacctgcgggtatggaaaagctgacgagacgagacgccccgcgatacagcaacgtcaaagactcgtccgtcgtcgcggtgcaagtctttgaccagagaaagttcaagagaaaggatcagggattcttgggagtcatcaatatcaaggtcgccgatgtcatcgatctggacagcggtggtcagggtgagttcatgaactacgatcgccattcaccgcgcatccacctcgctgatgacaacgccggaccacccgtagagatgctcacgagggacttgaaaaagtcgagcgaaaacttgcccgtccacggcaagctgatcctctacgtcaccaccaacacgtcgggaccgattcagaaccccggaccgaccgcgagcagtggtaacaccgtgggtgcgggatcgtccggtacggccgctgccgacgctgccaggcgagactcggcgcctcaagtgccttcgtcggccgccaacacgactttggccgcctcggcagcgggtcaagaagctgcagctcaaatggccaacccggcccctggtgttcccgccgtcaatcaaaactcgacgggcgcgctcggtgcacccacgaccaaccctacggctcaggcggcttccaccggggtcaacgccagcggtaccggggcctcggccgggaacagcaactttgatcctcatatggaccacctggggtctcttcccgagggctgggagaggagaatcgatcatctcgggcgacagtactatgtcgaccacaacaccaggaccacgacgtggaaccgacctagcacggaccaggtcgccaacaatgccaacgccgccaattcgaccggagatgctcgagcgaggcacaatttgaggagtttggcagatgacatgctcgacacgggtggtggttccggttccaacaccccgaatcccaacaaccagactcagccggcctctcctggcggtgtcggagcggctgggaacaatgtcgtcgccaccggaggcgcgaccgtcacccaggcaggcgcgggtccattgccccagggttgggaacagcgattcacccccgagggacgaccttatttcgtcgaccacaacacgaggacgacgacctgggtcgacccgcgacgacaacagttgttgcgtgtcatcagcccgagcggaggcaatttgaccgtccagcctcagaccgtcagccagctcggacctctgcccagcggatgggaaatgaggttgacgagcacggccagggtgtactttgtcgatcacaacaccaagacgaccacatgggatgaccccaggttgcccagttcgctcgaccaggtgagtttgcgcagcgctcaaggggctcgcggtttcgcaactctccgtactgactgcgcctctcctgacgcttcagaacaccccgcaatacaagcgagacttccgtcgcaagttgatctacttccgatcgcaacccgcccttcgacccaacacgggtcaatgtcacatcaaggtctcgcgagagaccatctttgagggtagttacagcgagatcatgaggcagacgccgaacgatctcaagaagcgattgatgatcaagtttgagggagaagacggtttggattacggtggtctgtcgaggtgagtaccgggtcgtcgcctcatgccttgtcgaaacaccgccggctgacgacaacctcgggggactcgacagagaattcttctttttgctctcgcacgaaatgttcaacccgttctactgcttgttcgagtactcggcgcacgacaactataccctccagatcaaccctaattcgggtgtcaacccggaacacttgaactatttcaagtttatcggtcgagtcctcggattgggaattttccaccgtcgtttcttggatgcctactttatcgtggcgttttacaagatgatcctcaaaaagaagatcacgttggccgatctggagagtgtggatgccgaacttcaccgaggtctcacctggatgctgtgagtagcgagtcgggcgaatctgtaaggggggactgctcaccgatctcgagcttcatcgtagggaaaacgatatcaccgacgtcatcgacgacacgttctgcacgaccgaagagcgattcggcgagatcgtcacggtcgacctcaagcctggtggccgagacgtgcaagtcaccgaggacaacaagaaggaatacgtcgagtgggtgactttgaattgggatcgtcgctgcgctcgagactgacgcccctctctcgtcgcacagcctcgtcacgacttaccgtatcgagaagcgtgtttcggaacagttcgaggccttcatgtctggattcaacgagttgattcctcaggagctcatcaacgtgtttgacgagcgagaactcgaggtgagtcgcgccatcgtctttgatgctggctgcccgcgccattcgtgcgctgacaccccacctttcccttgctcagctgttgatcggaggaatgtccgaaatcgacgtggacgactggatgaagcatactgactaccgaggatagtgagtcaagaccttaaacccatgcacggtctcgtcgctcatacctttgatcgcagcaacccctcggacgaggtcatcgagtggttctggaagatcgtccgagcctggcccgccgagcgaaaggtgagccgtgaagtcatcgtccagtcttcgtccccgaatagcgccgctgacttgctcgctcgagaatcagtcgcgcttgttgcagttcaccaccggtacatcacgtatcccggtcaacgggttcaaggacttgcagggttcggatggacccaggcgattcacgatcgaaaaggctggagaggtcactcagttgccaaagagtcacacgtgtttcaaccgtatcggtgagtcccgcctacgaacgagaacaatcgatacgatcagagctgactcgtacttttgacgcggtctcgacagacctgcccgcgtacaagacttacgagcagctcgaacaaaagttgacgatcgctgtcgaggagacgctcgggttcggtcaggagtagccctccctcttgcgacctaacaaatcgtcattgttgttgttgtttccattcatctctggcttccggcccccgacaccctcaacggctcctcgcgctcgtgtttcaatctttgcaacatcatctaaaagcgacatacatcccccgttactctcgactgtggtgcttgtgttctcatcttttcatctctccctcgagctctctctctctcttgtatcgtcttgaccttgaactagctatttgattccctagattgacggacccatcgagggatactggtgaaagagtctcgaggtggtatacaaagctcgcctttgactacccgtttgacgagtgaggctaggtgaggttgttgacgattcactcgcggtcgccggctggcaaactcgtcgttacgtacgcgatagccaaagcgaccacaaaagttgggacaaccgacctcttgtttctcgcatcgtacttgtcaccccgcaccccgccgacttcaagtatcccttcgacttggttagtgtcatccatcatagatccgcagcattcaggtacccatctcttgcctcgcggacatggcgccacggccatccctgcagctgaccgaaaagatatggcaagtctcgcagccgactggacgccagtcggtaggtcacctttgatcatgtcgtgctgaccaggctgtgcacgaccggtccaacagggtcggaggcacaatcttcctcatcactttcctggtctacgtaccacaggtcttcatcatatggccctggtacggacgtgaactcagtacggaattgttaaagctgctcgtccctttcaagtaagcctcggcgatctccttggaagtgtctagcgtagctgataatttcgaatcaaagtgtgttggcggggatgctcttctggaactattacctatgcgtcaagacgtctccaggatcggttcctcgcggatgggtatgtgtcaaagttccctccagcgacaaactatagacttcaactcaccctctgtcgcatcgacctcgtcatagcaacctcctgacgatccggacgtaccacaagaactcaaagcgaggaccgctcaacacaggttttgtaagacttgccggatctataaaccgcccagggctcatcattgtcgacgatgcggtcaatgcgtcgtgagttccggacgcgttgatttgagtcatacgaccatatctcatagatcgacctgtaactttacgacgtcgaactctgcagcttaaaatggatcatcattgtccctgggtcgccaactgtgagtctttcgccgggatgtcgctccggtgagcatcccaagctgatgggcggggacgggcaaacaggcgtcgggcatcataatcagggccactttatcaggttcttgatctatgtcgatctcgcgacctcgtatcatctgatcatgatgggccgacgagtgtatgacatgaccgcgtggacttcggtgagcagcagcgtggggagattggaacccacggtcgggtgcacgggcgttgataatcatatcccccgcatcacagccagaaccgtcaactttccagctagtactcgtcatcatcaacctcgccacctgcgtacccgtatggatgatggtcggtgtgttctcgatctaccacgtctactgcgcggcgggaaactcgaccacgatcgaagggtgggagaaggatcgcgtggcgaccatggtcaggcgaggcaagatccgggaagtcaagtacccctacgtgagtgcactacggatatccttacgttcacacgggtggcaacgctcatcaaccgttacctcgtgatagaacctcggcttcgtaaagaacatcaagtccgtattggggaacaacccgctcctctggctctggcctcaaaaagttcagagcgatggactgtcttaccccgtctccaaggcggctcatggtgagtttagtcgaccgggcggtcaggattggcaagacgtcgtcggggctgggagatcaccagagggagacgtcgtggaagaggacgaggacgaagacgatgcgaggtcattctccaggcaagagcgggaagctctgttgcgtagtcgggagggcatggaagacgtgtgagcgtggggatattcgcttggcgagcgatgacaaatacgacgaggtgagtcgatcagactcctcgacagggcaaggaaagaggtggctagcgggggaggaacgtacgagctttcctgtatggtgcacggaaaagctgatcgtgttcgctgcttttgcaatatactcgtggatagttgccgagcaatatgtctggccgccccaggatccagaacgatacccgatgcgacgattaccgtacagctcttcggctagcgcgtttacatacggcaatggcgatctcaacccggcgttgagggcaaactcgtcttcgcacgtcaacagcctaagagtgaggaagctttcggcagaaacgcgtgcagagttacacggaggaatacctgggccgctgcctcctcaattgtcgggcagaccagggcccgatgaagggtattcttccggtgaagacagggatcaagaggacaaggcatggagagatacggatgacgagggttccatgagaagttcgcccgagccctatctctcggattatgatgacgaggacggcgtggacgtcgagggcggacccgctcggaaccgccgagtgagggtcaggagaggaagtgaggggtacgaaattgcgccgacgagacgatgggatgcggagttggatcgtccgatgtctccaggcgggttcaaattggagactcgagcggacgatcagccgctgccagatatatagaaatgattctcgagataaacgataccatgatacccttgcgcaaggacgataacctctaggagtaggaatgatcattcgttgtgcgatgtgatcccatcctttcatgcatatacatcgtccggtaccgtgacgcccgcggctccattgccggcgacgggctgttctacaggcttgtccgctttgagacgttcttccacaaccgtctccagatcttcccagaccgtctttcccagctggtctactttgtgttcggggacgtgcgggctggttcggtagaggtaaactcctctcagtaccgtgtcctcatgttttccgagagagggaacaaggggcaggaaaaggcccagagggactcacgtatagctttcgcaattcctcacgatcgatccgcctcgaaccccatcgctcctaggcatatgagcgacgaaccccttggacgctcctttagccttggcaatctcttcgtcgtacaagaccggagcctgtagtgcaaagaggacgctttgaaggctcttagtgttggatggcgtcaggaggtagatgagcggggagaagacgaggtagctaccgggaggaacaggagcggggttatcagccattgaatttacgcaagccgaaatggtagctagtcggtgactactcacacgaggagacccagggtatgactagcctgtcgaaatcccagcatgggcctgatcacgccccatcggttgaacggcatgacgacgctcaacgccaaaatattgctctgtacggtgatcgtcctcttggcctgctccttttcctgctgatccaccgcggcctgaccgtcctcgggtccgggcaatcggcgggcgtcttgtacagattctagatctttttcgacggccgtctctgcacgtgccacggggtcgtcacccagttcggtgtcgggaacgggtacggcgttgacttgagggtgtacggtggaagcgagagcgtcgaggatcttttggaggtgtttccacaggagaatatctttccacgagtcgacgcccgtttgaaggatggccgatcgggctcgggatgttttgggtcgaggagtgtcttcaagcgtcgggatggctgcagcgtaaaagggagagacgaggttgacgagcctgatggatcgttccatgggtgctttgatgatgagcggtagcatcgcggtcaagaggtggaaccggctttcctggacggtccattcggcaactggatcctcgtcgtcgtcatcggtctcgtatccgccttgatccgcccgatcactcgtcttgaatccactcagggcggcatccaatttccatccatctgcccagacaatcgcgtccaacctcctgcccccctcacccgtcccggcggggttgacagcccattgcttgacaaacgtcctgatcgcccggggtgtccgaggcagcgcctcgcagtgcaactgtgcggctggcgatttggtcgtagcagacaacctcaacgtctggagaatcgtcaacaagtcatccgaaagcggagatggaacgggagggaggtagagaacctgaggtggagaggggaggtgaaggagttgatgtagcagctcgagcgttaccgggttaggatcggccttttctatcccggacgatgcgcggacccgtcagccaacgtgagcatgcgaggggatgcagacgaaatagcgacgcccaggccaagacttacgatgacgaggatcatcttgcccgcccaatcccgttcccacgtattcttcctcccgcccgaccacgccttgagcatggcgacgagcacgacgaggatgacgcccgtgaccgcgtatcgatagttgacgcgaccctcgaggagggcggcgataccgtggataggcatggcggcaatgacgatggcggacggtgtggatcagacggtgtcgccaaacaatgggtgtgtagagtagtaagtgtggctagtatgtgaatttaggtgaacaacgtttggcgatgatgcaacgtgcatacgatccgactttttttttgttcaaaacgcataacagttgaaaacgacaacatcacaagaacgcataatacaccatttctaggcaaaacaagcaccgtcatgtattcatctcaaaagtaacactggggttcatgatcactcggtatgtatgcgtttcggaggtgctcgaggactcagcgtctagtgagtagctgtacctgtctctcgatgtcgcgagggaatctcggtcacgggcaaataggaacggtcctgagcgtttgtctgtcgagacttgctcgattccgcgattactccggagttccttggtcaagatgttcggctcttgcctttccaggatatcgcctatacctacgagaaaaaacaaataagaaaagaccagcaatacggcattgtcagttggtcacacgtgctcccaccgcctagactagacgggttgatagtcggcggtcagctccgtacgaaattgacgtgaaacgccggaacggcgacatccggccgccgcccgaccgcctacgcgaagtgttgagaagtgtcacggttccagtcggtcttatatcgagatcttttcgcttcgacgacccgacgcagatgctcactttgaccccttcggagcgagactgagcccacaagactacatgggtattgaaacgccaagaccttgttgcctgtttgtctgtttttccttccgaacaggtcgggacggttgcacgcggatccggggtttgtgatcttgtgagtcatcttggaccaacaacccttcgatccacttgaatatggttaacgatcatataaagacctacatcaattcaatgtgcacacgtgcaggatgctggcgaccgtggatccgacttgcctgatttgtctaaacaaaatcatcccaacacccaacctcgtagcctgacccgaaacatcaaccatgctactcgacctcgcgcgtccctctcaatcccccgccctcgtctacgccgccctggccatgggaaccacctttttaggattctcactcaacgccctcctccgtccagccaacgccttgtcgttcatggcagatagggaaatgccgaaaggagacgaagagaagaggacggtccggacgctcttgcatttctacgcggcgaggaacgggttcatgggcgtagggatcatcatcgccgccctggcgtcgacctcgaacgcgaactcggcgtttgaccaggccacgtcaaaggtcatcttgggcgcatcgatgctcctcgcgggcggggtcgcattcggggatggactggcctgtaaagtcaacgtcggcaagggggaatgggatcactggggttacgcacccgtcttgatcgccataggtgccggcttgttagggtggatggacagggcgtgaacggagcaggccgcgagtcagtagaacgtgtgtcccagcttgaacgatcgagctgagattcgcttcgtagcttgcttgcacttcagtccgatgcacctgattcagtgtacgtccattccagctcggccgacgatgcatcaacggtccggacgtcatgcgacttgaggtaaccttgtcggctcgtcgtcttgtaatcatctcgattttgaaaactagaacgcggcactctcgccttgtggtgacaaaaacatatcaagagttcatgctgccacgaggtcatcctcgtccacatcgacccaagctcgctcgtcattgttgatgagaataaggatttatctgcttcatacaggtgtctcgttctcacggctcctcggtcacgacgactcggagtagtcggctccgatcgccttgatggccgcacttaacttttcctcatcgacctcgtcgacctccctctcaccgaccatctcctttggtgcggccaacctccccgcctcgataaagacctcttccaatccactcccacggccggcaaacgagtacatacgagcgtacgccgactcgacgctgtacctaaaggcgtgtccagctctcaccatgatgctctccccacacgtgatcgtctcggcgtgaacctcgcccgaaccgggctcgatcaactcgaaagcgaccctcccttcgatgactcggaaaagcatgttggtgttctcaaacttgatcttgcgaccgcccttgaagggaccggattcaaaggccggcctggagtggatgaacgtgggataccggtcgataggtccgttcccggcgatcatgctgacgctgaaattgccatcgctattgctcgatcggcatagcggcgtgttggattgcccgttgagaaggtacttgggacccgtgtcggaccgcaagaagtaggccgccgtctcggtcggcagggtgttgctgcaagcaagacgaaagcgcaagagagggagatggcgagggaaccgcgttagcgaaccatatgatcatactctcgacgcgatgccccccggtgcttactcttcaccctcgttcacttccggccaattgtacccaaactgaggcacgatgtcgtgacccatcttgatctgctcaataatgtacatcttgtcgagcgtcctcgtatccagcgccttgtatgtcggcgtctcgtcgcaagggatcccgattaccttgaagaatctgcgtgaggggggtatcgaacggtatcgtcaggcgaagccgagaccggtcctttatccatttcgatcgcttactctacccaggctccgggagagatgatccctaaaaactcggtgtcggctccgacgacctggtaagaatgggtgattttctgccgaaaacgagggaatacgggtcgcaatcagtggcgagtatcgtcgaccgagcaaaacctggccggactcactggcggcacataggcaaagtcaccgggcagaagtatacggctctgatcgccagcccacagtcgtacagctcctttcgtcacgatccacgtatcgtgagctccgttatgaaagctacaacgtgcgatctctgctttagccaggcctcgagcacatatgcgccggcactcactgtggcaatacccgctcatccggaccgctcctcgactggaccagaccaaaggcgttgtcggtctcgttcctcgtcgctaggtatcgcactgtgctgcccccgacgacggacaaagtttctccttcttcggcttgcaggacatagggcttgtgtttggggaagggatcgttgtacttgggcagacgaagtgccggagatgaagaagcggtcgaggacatctttttatcgcgcgcgtcgtacgatgtcgatcaaatgatataatcgtgcgtgatagggtgagtgatcgatcgatgttgaccgacgacatgtttcctcgtcttgggcttgagcatagacaggaccattggatctatatacatcgggccgtgtattgctaagtgtcgatagtggacctttgtgacgttgttcgaggcgactaagcgattctgtcgcgtccacttcgtcggacgtttcgctcggaccgtccccgtccccgtccactttagacatcgccggccggaaatctcgccggagattcgagggcaacaacgacgtacgacttgaatgtggctcggattagactagaatagcctggtcagtcaccggtaggtcaatcatggacgtcagaatgcggggcatggtgttaaaatgtggcatcgtccggaacatccgcatgatctgccccggccggccatttgaagtgtgttgacatgacatggcatggttgtggctcgagtcggtgatcacgtggacgtttgtgttgaacatgcagcatatggacattttgcatatgcatattcgaaagaccatcaacaacgcaatgtcatggacatcggcgttcatttggggtcggtctcacaacttgtgaattgcgaccagctaccgacactacgatattgtcgaacacgctctcgaccccagccatgacatatccaactcgccttcttgtaccgctcgcctttgcactgctcctcttcgccgatgacatcacggctgaattgaccaactccgacctcaatctcgacctgtacgcggagaccaccctgcagggacacgattggatttatgaatttcctctcaaggaaaccaatgtgtaagcaagaccactggtctttagtacgtaattctgtagatcaccgccaacgatcctgatattcaaccttctgggcccggcttccccacgatcccgcaactcacagactctccagggtacctcccccctcggaacaaacatgggataccatctttctcccacccaacctcgacttggcacaggcgaaaagcagcccgtttcacgtctatcatccggacttctacgggatcatcggggatgaaccgaggttggccgtcgtcttggaaacggaagggtattacagcgcacacgaagcaccaggtatgttcatgttcaggtcatcgcgatcgagagcgtcgtgcccggtcgaacgtacaacccagactacggcgatcggatgttgatgacattgacacggccatctcgtttggcgatacctctctttggacaataccatgcgaaacgccggaccgatagtctaccacgaacccactcaatccttcttcttctgttccaacgcgggagctccactcgggttttccggattgaacaatagtaaccggctttaccggatctcgttggacgaggtggagcaggccctaggcggagagaacatggacagcgagcaaggtcaggcgacaaaccgagatgccacggagaaaggccctgtctacctagccggccgcggtgaatggcgagcgggtaacgtgaccctgcacgagatcagcgggaaggatggacgagagggtgatcttgtcaatgtcaacggtggtaagcacggacgcggtgtccatcgcacatcagaacagaggctgatcgtcgttcgtcaccgtgatcgtgcgggcataggtaccaactatcgaagtgagttgatcaccgtcgtaccattttctcatgaccttgtaagccacttcttcgatactgactgacatgatcattttgcgttccagaccagctcgttttcctggcacaaggccgaggagatgagttgccacctacaatgacgcttgtcaacccatactctccgtacaactcgacaggtaagtctcgccgatggtttcgctctttttctcgaggatcactcgctgacgttccacgataactagtcattctcaacaactttttcggcaggcaattcaattccctcaatgatatcgcttggcatcgtcggaatggcgagctgttcttcaccgacccagactatggtaatgcgcaggatttccgtcccactccggacctcccgctgcaagtataccgatacaaccaggagaccggtctggtcagcctcgtcgcggacgaaatggttaggcccaacggaatcgtcttttcacccgatgagcgcaaggcgtatgtcgcggatacggggctcgtgggaaaagaccgagatccgagacgtccggcgaccatgtgagtatctcacaggtgtgccgtgcaaagtaatcacaataatgacatgtacctctgggatcttggtagatacgagtacgacgtagatgagcaaggatattggagcggacgtcggacgtttgcgtttggtacgcttgacatcgacacccaggagctatctgaaaagagagcgttgttgaccagaagcttcgatagtcaataccggtgttcccgatggcctgaggtgtgacgagaatgggaacgtttgtgagtcgaagaggtgacatcaacaaggagacgctagaactgatccgaccgcgcccgtcaacatttgcagatgcaggtatgtcgaccggtcgttctccccaaggtttgcagacggctcgctgagaggaacttcttttactgtgattttgcaggaactggcgatggcgtgacagtttacaatccccagggcctgcttctaggcaaaatttttgtgggaagtggtagcgccaactttcaatgggctggtccgggcaggtgagcgcacgcgctcttgttcagtatcggctgccgaacccgcatcctctcactgactgcactccattcggatttgacagaatgattatcctcgcggagaccaaagtctatgtggccaagcttcgggctaacggagaccctgtctggaagactacttgaacgattcgttgtgggcgttgacccttgtcgacgcgtcgcaagtcttgtcgaatcccggccacacgccgaacagtgtaacaggaggcaacagatttcgtatttcgtaccaatggaatagcacaaagccctcagagatgctccgagctgttcatgacatcctggcaagactgatggtatataaattctggttctctgccccgcgttttcgatcatcgcgaggtcatgaacaatcggttctatgtaccgcaaagggatagcagactcgcattgaacacctcggtcttctcattcacctactgctcccaaggtgattaagttgaaattcaaatccccctctgcccgttgaatatacttttcctggacaactttggcgacgtccttgattcgaaagccgagtgtgagctggagcccggcttttcaacacaacatggcggcgaacgccccgccatcgagactcacctccaaaaaggtctcctgcttcgtcttgccgcgatcaaggggtccttcacgtcctccatcgagttcgactatgtgtagcgatctggaaagaccgggagtaagcatgacctggtcagccggaaaagacctcgagaccgtcagatatcgcatctcttacccgtcctcgtggagaccagagacgaaagcgatgaaatgcaaatccgtatccctttcctgctccgtctcgggcaacctactttgaccagcagcgacgctaccttgatgcgcttgctcaaaaaaggaagtctggtcgagtaaccgagcccgtgcgagtgggtctagggagagcgattctgatttgaaactggaaagaggagaggtggatgggatggcctggccctcatcgggcaggttgaggagggagtgaaggagaccgatggaacctgtgatgaaagcgagttcagagtggggtgtggtcgtaataacagacagaggctgaccgcaggcgttggccgtctatggtttgcaatacattcgaggtaagagacagcctacacggtctcctgcagttctctgacttgccgtttgtttgatccaccaaattccttcttgaccctcgtccgccttgcccttccatcttagctcgcctgtggcctcttcagccttgcgttcctcggcaagctttccacgagaagggaagagtaagagcaccgcatagaccggttgtggagtgtattgcaggaaatcgggatcgagcgagtagaggtcttgaaagccaagccccgagggcaaacctagcggtctagcccactgtgaacgtcataaccgtcatgagatagtgtatgctcagcagtatgcctgtcatgagacagacttgaggcttgcctggttgaatacctaagaatccggtggagatagccgacaaagcgatcagtccgttgatgaggtcctgtccactggctcgcttgtccactcgagaggatggcttacatcagggctagcttcgagaggtatccacttcgaggacgacgaagaggcggtttcgtgagtcgacatgaccggtgataaagaggaccaaggcgccttgctatctgtgagctcttgaggcgaagacgtacagataccccagctatcaagattgacttgattcgattgcgtgtattgtacatggcagatatgtttggggctcgctcgaacggatatgacgtactctcgcacccaagcgcgtgtctcagaaatggcaaggctgtcttgtccgtacagtgattacagtaaactctctctaaaggaaaggggggtcatccagaacggactcgtacagatacatctaggggcaggtctattcgtctcatcgtttagcctttttgaacatcgagaatcctttcctccgcggagacttgcttggctcttcttcgcaacccagctgactcgctgtcctgaccagagaagttggggtcgaactggaactcgcacccgtagcaaaatctgacgaccctgttgatcccaaagtctcccatccatagtctttcatgcctctagctcctcccgtttgagcgcgaagtgtagattgcgggatctcgaaaggtatagatgaaagctggctcccacgtcctttccgtttctgaatcgttatttccgaccgcttagtggataaagagaaaggtgacgtcgaggtcgaggtcgaggcggatggctgggcagtaacatttgaacgaggtcgaacgacccgtgcccggtctcgcagattcaagtctgcccgcagtgccgctcggtccacaaattcctgtcgtatcgattcgatggttggtggtggacgcaggtacagccaatccaattcatcgtcccctgaccggctcgatcctccagttcgggtcccgcccgagtatttgtatcgctgctgacgtgtatcctgagcgttcccccagggaggccgagtaccgtggtctgtggtaaaggccatcgagcggtccatcctccatcctgggttaccgtctcggtgactatgatccacttcgacggggatgggcaagatccattggtcctcgtctgtctgtccagtatcccgcttgatggttctgatcttgcggcggacctcacgttcacccttgaacctcatcaattcttcctgtcccaagcctacgacattgaggatgcccacgttcgtctcgtctccctcgccctcgctctcgccctcgccctcgccgttgttgccttcgcccacggacagacggccaggccaccgtgaacgataagccttgaatttctcgtcaacctgtggatctgacgctgcatgatggtacggcgaggcgacacgggggatcaagaatgccgcatccagagggatggctcgagtccaatgagaaccgagcgggaaggtcggttgatttgtcatacccgtgttcgccagggctgtggcacgattcaaagcggatcgtggacgacgatatcaaccacatgaaccgaaatcattgcgcaccgagccgggctgccccgacttacacaaaacattcagcatgggccatctcgtcaaatccctgaccgcgtggtcggtgatccgcttgcaaccatcgagccacaagcctctcaatctccaacaccctctccccgtctcgctcgtcttgtctatttgaccattcttggtaaggacgacggcaccctcgtaatccagactcatggccaacgacttgatcccggcgttcgtcacccctgtacacccgaggaggaacaggaaacttaaccaaggcaagttccgcagagcgacgatcgtcgtgtctgtgagtaggtgcgaggagagcgatagggaagtcaagagggtgtacgtcggcgtaggaggcagttgcagcagggtcaagggggaagaggtaggcaggtacgcgagcagttcggtgatgggaaccaattgggtgtttcctcgagtgcttgatgtcccgcttgtcataacacgtaatggtgaagacgctccagagtgacgttgacgtccggtttgtaggtgaagcagccataggaagagatcttgctcttgccaaggtcgtccatcatctccttctcgctcctgctcctcccccttgctcgccccaaacctttcttccagatatacccatatcattcgcatgtaccgctcccctaccccatgaaatgacgagggatcgtatcgggtgatattctgagcgatgttctctaggcaaagaagagtgagggacgagctcgagctcgacgccaaaggtttcaaggcgggtgggtggagaatccatcgttgaggaggcggggctctggaattgaaagtgatcgagattacgatgagctgacggtctcgagactttgcgatcagggaacgaccggtactgaccgccatgaacgatcaccctctgtagggtctatacgagtaccatactcgttctcctcgtccgtcgcccggggcgctatccagactgtcgaattggatagggagggattcggacgatccgatagcctcatagcctagtgtcgaacatgagtgagctatagctctttccgaacatagtgtgcgcagggaccagcagacttcgaagtcgtgagatcacgaacatcgtggttgtcgtggtataaccatcgagtatcgatcaatcgttgctgactctagcaggaggcgtctacaccaaggtttctacccatcccgattttcgctggagcacacggccctcggcgacttctgacaggaaatgatctaaatccgttgagtatctgcccttgcctcttcatccaatctaccaccactcgagccgccctcaaatccaacttgtccttctacaacgttctcaagccatcttacccttgcgagttgtagcggcagatttatcctgcttcggcgggaaaaacacgtttcgacgcaaaaaagaatggagacactgggaatcgaacccaggtcacttcaaatatcgaaccgatcatgcgaatgaagtctcgtaccactggaacatatccccgttgatcatggtctcggccagcacaacaacactaacccgtgggtgttaaacttgtgctccctgcgctctgtcatccggttcttcgaggacagactgcggcgaataagcagtccatctcgatgtggagacaagctacacaacctgtccgttccgcaatgtgatcacagactcggggtacagcagactgacttgctggcgaggcagcgtctaaaatcaatcacatgtcaccgagctggaattttcagatttgctcgtaaatccattcctacaagcgtcttcttctgtgctttcaactcaggcaattcgtggtgaactcgaaacccaacgtctttgatctcggctttccggaagaatcgcgctcgacatgtcaagatgaacacgatcgatcataacatcatgaataacaaagacaaagacacgatccatcctcccttgcgatgagcagctaagtccatatcgttccttttcagtcgcagagagaagcgcctagaagccattcgataagacgggtcgcggtgatagacgagacgtcgagatgatccgacgatggccgcgaacacccgggcgcctactccgagttgatcaacggcgccctctcctcgtcgtgcaagagcgaaccgcccttcctgaacgttccgctaaaaagtccaggggttcatacacgtcacgtcgttcagcatgcgagactctttcgaggaagtctcaacaaggaaagccggcgactcgactcactagacgctcttcaggatggcaaacagactgaggatgaaaaaggccagggcggtgtatcggacaaacttggacccggtctgatgaataaagacggcaaacaggtaaaaggcgatgacggcggatccagcggggtcgccttcacgtcgagagaatgcgtatgccgccgccgtggattcgaggaagactatttcaagtgtgtgatacaaggggaccgacgaatgagcggaatgcaggtgacgagcaggtccgggacgggtcaatgactcacggaacgcgaaaaagacaaacactttggtccagaccccggcgtgatgatgagaatacgcgctcttgccaaacgcctcgaaaccgctcaggacgacgaggaccaaggaccatccgtgccagagggaaaagggagtgtggaccaagagttcctcggcgacggtctcggatcgagtggattccgacgatttgatcgtgtaatagatctgcgagacggtggcactgacgaggagagacaagatgaatgcggtgatgtaccctgcgacccgtcgtgggagtggaacatatcaacgatcagcttgcaggtatagacaggtcgatggggtcgacatgtgacttgcaatgtttgtaccagagccagacgaaagcctggttcaagaccgccaacaaggcgaacctccattgaacggagtcgacaaagacttgcttgccgcgttcagtgaattggtagaacatcaggaagaagaggaggagatggatctgtggtcgaaaggcggtgccaaatcgtcgtcgtcgtcgtcgtcgtcgccgtcgagggtgatggtcaaggcaggaagaggacagtagcaaacaagacgatgatggccggaaaagaacgggaccggcgagtttgtcgatcgtcccgtcagtcgacatccttttccgccacagatcactcaatttcgtcaaactcacgagcgaccacacatagttggcgtaataggacggggtgacaaaggtctctcgaccggacctgtaaatatcctgaggtccggcgaccgagtagatgttgcttcccaacaaggccgcgaagctgacgaagtggacgtgatggtgagatgagatgggactgggactcgggggcaacgacgagggagacgtgagtattttgcttacacgacaatgttgacaatcttgatggcgagtccgtcggtgacagccatattgatgattaagggtagtgttgtttggtttggtgctatactgtgtcaccgagtctggttgctagttggaagtgatttgattgttgaaagagggcaaggtgcggtggttgttgaacatattgattgttatgaaagggaggaaggacgagccaacccctgacatgactggcgtgcggaatatgggcgtcaacaaacgatgacatcacgattctcagcgatcatgtccgcgttaatcatataaacctgacgatgtccgtgttccatcctgatgtccgtgtatcggccctgctcgaaaaaacgctgcaatgtccgcgaacgccgcatcggttccgaccgaaccgggggtctcggctgcgatgccgatggatctcacttacgagcgagaatccttgactcgtgcgggattctgtaccgcatgcaacaccgaccccacccacttcgctcgtatcaagacatctcatcaaacctcattcacaccgacatcgatgttattacgtttcgatcgattcaggactttgtcgaattgatcgtggcccatgacatccatctagaacagcattcggggacatgcggtccatgccatttcgtcgactcgttccatcctttcatcgctcgcatacattgccataaccaggtcgtcaaagtccgacataatttacaaaatatagctttcggattataatacccaacatcacacaaagcgaagggaacacgctcgacaaaatctctccaacctggcacacagggagacgacacctacggcaggctaattccataccgaaagttctaatatcgcaatgacatccgcaaaaagggtcgatcccgatcaggattccctgaaaagtcacaccacgagactacccacgtttctataccctctaagcttttgccctccggtcccttcaccatggcgacatccgatcgcgttcctcaagcatccaatacctctctatgtgataggaatcgtctcggccttgttggcagggtcgacggtgagtcctcgtcgtgcatctcggaacaccactcggctgaccaggatcacaccatcgcccagttgccactatcgggtatcgtctatgggaggtggacaaatacggtcacagcggacggatcgccggctgacaagctggcagcgtccgagcagaacggatggatcatgaccgtcatcgggatcgctgcattcttcttgtcctggctctttctcttttgctgcaagtcccccccggtttgccagcccctcctcgtctgattcaccacgctgacctcgtctctccgctctccgtacagtcgccacggcctcggacgtcatcacgctcaacctccgtcgagcgttcgtcacctcggtcttgatccaagatcaacactttttcgatcgaacgggaccgggagaggtggccagtcgcgcgggcaaggatatcaatacgatcaggacgtcttatggggaaaagatgggatacgtcttttggagcgtgggcacactggtcgcggtgagtgcgggttcgaggcttcgggtcgacgccgttcagcgtcacctgctcgttcgtcttttgaccgtgtacatgatgctgattccaggggtcgtttcgcttcgtgaccctagtcgatcatcccctcgttcatcctcgcccctcgtctctctggcgtcatcatcagcgtcatccctttcacactcttcatcatcgccgtctcgtcctatctcatccacacctcgtccgctccaatttcctcgctcgagggtcgctctgcgtcgctcatcgaacagatcctctcatccataaggatcgctcagaccttttctatggaatcgtccctcgtcaagaaactggacggcgcgttcctgagcaagctcgaaaggctgggtcggacgagggccctcgccagggcgtttgaacaggcaggcgtgtatttcgccttgttcttgacgttctccctgagtttctggataagcgggatcgaagtcgtcaatggggtgcaggtcgggtacgctctgaccgtgagtcccggacgtgccctcttgatcggtatcgaaagcacgcaggctgataggatgcgcccggtcgtcatcgccgtgttctagtgtttttggaacatgatcaatgcgtaagtcgttgttgtgccctccatccgacctgtacctcagtatcgacgcgtccgccttgaggctcccgctgatcgtttcatccgattcatcagtctgtttgccctcgccaacgtactcccccacatcgccagccttgctgacgcctcggtagccttgacaagccttcgaaggcaaatcgaacgtcgcccgtttatcgacatcagggatccctcgggaatcaccttgcccacggacactcacgccctcaagcttcgaggcggaccggctggcgtggttcagcaggaatcagccgattgggagcccgagtttgaactacgcaacgtcacgttcgcttatccctcccgacccgccgtcaagagcctcgataacgtcagcgtcaggatagaaccgggcaagatgaccgctttcgtcggtcaaagcggttcggggaagagcaccacggtcgccctcctcttgagggaatatgacccagagacgggtaatctcaagaacccgtgcgacgaggatgtcgacgtgggagccgacgaggtctcaactttgaccgaaggcgaatcgggccaaacccgctcgagcgacgacgatgaaaagcaaacctctttgtccccaaaaaagaacaagctgggcggcttgtttcgctccgaggccaaaccgagcgatctcgaaaaggctaacaaaagggaagcagaagagcgagcccgcgtacaagggtcaggaactgtcatgttcgccggaagggacattcgagagtacaacctccagtggtaccgtcagcaaatctcggtcgtttcacaagcgcctcaactgttttcgacctcgatttttggtaacgtggccgcgggactcacggggaccgagttcgagtaccgaccagagcgagatacgctcgacagcaaggacgccgaggtcgccgagcggatgacgatgatcagggagctcgtcgaggaagctctaaaaaaggcacaggcttgggaattcgtcgcccgtttgcccgaagggatggacacggttattacgggaggtcgagcacagctgctcagtggaggacagcgtcaacgagtcgcgctagctcgagctttggtcaggagaccggcagtactgctgctcgacgaggcgacctctgctctagacaccgcttcagaggacaagatcaggaagatgctcgagatcgagcaaaaggaacgggggatgaccctcgttgtcattgctcatcggatgagcacggtcgtctcggcagacaagatctttgtgatgcagggtggtcaggtggtcgacgaggggacctatgatcagttgctcgcgaccgaccgaaaggatcagacctttagaaacatggtactcgcgaatcaagaacagcagcgggctgactccaccgcgaacactggaaccgagcccgtcgcctttgagaacgatacatacgattctaccaccagggacgatcagtcgggaatgtttagcaacgccagcaccgttggcatcctccctgaaggctccggcatgagcactccccccaatctctctcgaaatcgctccaattcgaccaactccaagcggcctgacctgcacatgttgtattctggtcgaggcagcaactttggtaggatggatcacacagtggacgggccgatcggtatggccggcacggtcaaccctccggtcgaagaagaggatgaaccgtacgaagactcgtctcaatctgatgaaaagcccgacgcgatgaacgccgaacggcccgatcccctcaagcctcggcagtatccaaaaagtaccctgctgaaaaagtactggcgcgtcatggccgatcgcaaatggtggttcttgctcggcgtcgcctgctcgattgctgcaggagcaggatggcccatcgaaggttggatggtcggagaaggtgttcatgtgctcagtatcgagggggacgatgcagcggtcagatccggcgcaaacagatgggccttctggttcttgatcctcgccattgctgactttgcagtgctactcgccaacggggtggcctttgagctgacttccgagcgcgtcgtgcgtaatctcaagagggagggtatggccgctctactccgtcaagaagtcgggttcttcgagagcaacgaggagtctgacgcgggggctctcacctcggccatgtctgccaagcccaccgatatcaccgcggcctctggattgatcctgtctcagatcctcatctcgatcgcaaatttggtgggatcgatgatactgggcttcgtcctgtcctggaagatcgccgttgtcgcgctgcctccagtcctccttacctttttcagcggatggctagtaagtctgccgccaagtctgcattacgtccgtctcgctgacaaatcaaaccctcatcgcagaatgtggtcatgctggacaaatacgaaacacagaattctggacctgcctcgagatgcgcttcgttcctttcagaaacggtagacgtggtcagaacggttaccaatctcaattatcaacgggcttctctccggtcattcgacaaacacaacggggtcatgaagaagacgacgctctacttgaacctggggtcgattggattttccatctctcaagcaatgatcatcctgctccaagcgctgctgttttactggggaggcaaactcacagctgaagaaggattagtaggtcgagtcggaagtatcaagatgggccgacttcacgctgatcgcgtctttccgcagtcgacggtggcactgtttgctagtttcgaagccatcatcattgccgcaagttacaccctgttgtttctggccaaatgactgccaagcttatcgtctggtttacagagtttcgcttcgagccgtctgctgctctttgtaggcgacgtcggtcgagctttctcggggatggctgttgtacaggtgagctgcttttcgatgccacgaggcgttttcttgacgggaatcgcagtctggttttaaaagacattctgaccggaatcatcgcttcgcagagctggtttgatcgcaagcccgtaatcgctagcattgcctctgaatctagtaacgagaagctagatcatggcctctacgttggcgacatcgtactgtaagcgctaccgacgtggagcccgcatcacaaacacatgctgattatcgagcgattcacagatcggatatcgagttacgatatcccagacgacccgaacacgctgctttgagaaacgtcagccttactatcaaatccggccaaacgcatgccttttgtggttcgagcggttctggaaagagcagtaagtcaggttgaaaccgacagcagcgcgaaaagctgaataagtgtatgcgcaccaggtcttcttgcccttctgctgaggttctacgagccatgcaaaggaaaagtcacatttggaggcagagactctcgctcgattcctctaggagaattgcgatctcgctgcgcatacgtgtctcaagatccccagctattcgaaggcacgatccgctggaacctctgtcgtgagtccgggcaggtatcgctccgattcaatcgagtactgacacatccgattggtttcaactattgtttagtcggtgccgtccacccagatcgggtatcgcaagatgctctcgaggaagcttgtgaacaagcttgcattctcgacttcatccgaggattgaaggatgggttcgatactgagatcggcatgaagggtgctgcgttgagtggtgggcaaagacaggttcgtcccggagtcatatccccgtcgtcacgagatccgcatctcacaatggttcgttcacctcgcagcgtctctgtatcgcacgagctttgattcgaaagcccgaggtcttgttcttggatggtaagtacctagaccgtccctttgtacggcttccaacagactgattcctcgactcaattcgatagaggccacatccgctttggacgcgacgtccgaactccaggtcaacaaggctctggcaaacgcttcaaagggaagaactaccatcactatcgcccacaggctgagtactattcgtcaggccgatgttattcacgtcattgaggatggaagggtcaaggaggagggtagccatgacgaattgatcaagcgccgaggtcgctacgtcgagctcgtcgaggctcaaatgtagtattttaggtccatcgccagatttttttctggaatggctaagcggggtgacatataatgctgatgcgtttacaagtgcgatcccagtcctcagtacagacctttagatcgctgtaacgatcggtatgcagagatgagtgaatgttgaccaggctgaaccctgacgacggtcttgcagatgatgtcattcccgcgccttcagcgttggaggctcgatcgatatgtgaactaattatcatttcgttatcgattctacactactgtaccctctttcgaacagcaactgacagctcctaacgtctaaatacaagctcagacacttcgcacgatgccttggcaaaagactttgtcagtatcttccctgcggcagtcgttcatgacagcacggccgttacattcgacgtctcacacttctgttggcagcactctctcccggcaagccaagggatgccacctggtcactcgagaagtcgagcagcaaatcaaggaaggattgtcgcagacgaaaatcggaattttgcacctctttatcaagcataccagtgccggactcacgatcaatgaaaactatgattccggtgggttgggactgtggttggaggttaatcgatctcgaggatcgaactgaattccgtttcgtttcctttgcagatgtgagaaaaggtacatcctagtttactcaactttgacaatagttatccggttacggtactgatgcggctgtattgaaaccgacgaggtgcttagacatggacatggcgtaagctttcttgggtggacgtgaatctgacataatgtcaaatgcttagaaccctctccatatgggcttgacagactggacaccattgttcccgaatcgctaccctggaagcataccgatgaaggtcccgagtgagtctccttgcagacattcgactgcacaggcgagactttgcaagctgattcaaattcgctccgtagtgactctgtctcgcataccaaggccacccttgtcggctcttccgtgactattcccatcaccgatggacgtctcaacttgggaacttggcaaggtgagttccgtcaacccttggcttgccccgatcaaagtgacaatgcgctgatgcagtcgtcggaaataggaatctatttaaccgagttcaggcatcatccgcatactcgtagtatcgtggcgacgatcacgtgagtgaagaatcgtataatgaagactatcaatccccatgttaagcagcatgacccgctgttcacagcccttagacaggtacgtgagtcctaattgccaaaagagactgcatgggtcacgatgccggtcgagcaggtctatcgacccagtccgtagctatatcctcttgtctcctggaggacatgtaagaagctgccatgacaaccctactggagccgaccgggatgagactccaccagatccggggcgggcgtcacgatcgtattcgtttgcaaggaccggctgatctattctgagcgggtctctggcatgtctacagctcgagcttttcgcccgtttcaatcccgccatgtaattcatacaccctcaatctcctgttcgaaatgttctgaacgaaccctcaggtcatcaaggtgcattgtgtgtttccttcaacccgacccggtgccctggttttggctaagccagtcgcctaggctatccacagccctgcgaggctgccccttgtgctgcattagatgaccctgcagcgctgccaccgggtatcttccctctgggatcgcttgagcgtattcacgagccaatccgcgaatctctgtgcgggtttccggtgtcgaagggtaaaagtgcaggaacaagtcttcggcctggaaagcaaagcaagaatcgctgatcagtcagtgcccttgatgtgactggatatcagggctggtacgacccacctgctcctgcgtcgcattcttgaactcgatccaaacgtccatcctccctggcctcttcaacgccggatccagggcttcgacgtggtttctatgaggtgcatagcaagatcgctcagtcccccctgccgatcattcagcccaacccgagactcacgtcgtcgcgaatagtacacatccttcttgagttaacacgccgtccatgcaattcactaccgatagggactgtcggtcagtagtgcatatgtcatcggccagtccccgaacgcaaaaatcactcacgcaacccagacaaggtcacccctgagccgcccggtaacggtcccgctccgagctgcttcttcctcgtgtcccccttttcggcgtccaacgggtcctccctactcgggaatgcacagtcactgtatgcggcgagaagtgagggtgggagagagagcgagatgaaatccaaagagcatgattagctcgccgaacacgtctccgcatggtttcatactcacatgtcctcgaacaagaggatcgcacgttcagagactgcccctgctagcgcctgtagcgtctgatcgtccagcctatcccgtaaattcgcgttatcagcatcagtctcgaaatcatatgccatcgggccggctcgactcgatgacaaccggggttcaccgtatccgtagccgatcacggtcggtaggtgcagctgagggctccatgactcaccctttctgggcaaggttgaccacgaacagatccagccctaacctccccgccaacgccgtgatcaaggacgtcttgccgcttcccgggactccgtgcaggaggtaacctcgtcgatgaggaatgcctgctaggcgagaaggtcgagtagagtagagtcgagtcggtagtagaaagcgaagagttgaaacgacgccaggagagtcaaattcgatcgaaacaggagagtgaaatgcaaaggggattcgtagcgcgaggcgaacatccggattgaggcgagtcgaggaaagttggaaggagaagatggagtaaaaaggcatgtcgagggaaagatatcgatcagggtccagcaaaaccggattgccaaggagagtgcacgtggccgacaatgcagaatgaaaagaaagtgggacgaggggtgagcaaagcacaccacagcccacgcggcagacgcacctcgatcggcataccactccctccctctgaagaactcttcgacatcgttgaccaacccctccctgactcccctggtcaagaccacgctttcgagttttctcggaggtctcgctgcagcccgctgccatgcccccctcgagccagaagacgaagaagacggggtatagacgatgatcttgcctcgatcgcgagcttgatggatctggcgggcgtgcgtgatgagccgtttcacgatcgattgggattgggcaaacacgctgtgatcgtggcgtcgcgttcgaatgataagggttcccgtgatcgttgttagggtcggtatggtcgggggggggggggagcagtcgtttatcagtctcgtgctggcattgatgctcgcgatctgatgcaaaagaacatgggaatcattgcaactcgacttacgtgacctccaagctctctctaggatctcccatccctttcccatccaccactcgacgaaacctcaccaacctgccctcaaagatggtataccggacgccgtcggggctaggaaggaacgaaaacccatccccagtgctcgtctcgtccgtcgtcgacttgcctatcgaggtcccaccgctcgtcccaccactgggtcctgctgcggaccccgaatcggattctccaccgctcgtccaggtcgcaccgggatcgtctccgtagacgccgacttggaacctcctcgccgtgcgttgatgtgcagcggtcgagaggtaggcgaggagccacgagtaggagaggtcggtgtcgacgaaaagagcgtggatggtgaattctgcgcaagacgatgtagggatggatgcgtagaagatgcaagttggtaaaagggcgttggaagggaaggagacgtgtaggccggtttaggttaaagtccgcggtagggatgttaagatgatgcaatgtcatgtcagctcgtttgacctctattcaggtaagatcagggtgaatgcagggggagtaaagtcgaaggccggttgaagcaggtcataagaggaggacgaccggatcgaccgcagagttccaccaccactgctagactcacgttcgaataccccctgggcgatcaaccctacccccctcctcgccgcctcgagagccccaccgagaacgatcaacttgataccgtcccgaagggccgcagattcgatggcattataagcgaagtctaggacggtcgaggtaatgctgtggctcggtgccggagcggtcgtggggaggatggcataccgatcgtcgtcgggtcgagggggttgagagattgagacgggcgcggatggcgacgatgtcattttgagaggaaagattttgatgacattagctccgggcttgtggttgtgaggagccggtcatcatttcagagtgtatgggtatgtagtaggatgggaactttttgaatagaggtcgatcagagttgccattgccaggtacgagcaagtcgctaggtcgatcggtcatcgtcgtcgtcgtcgtcgttcccgagaaatcacccgagaaacgccatcgagagaccgcagactgaccatatcatcctcactacatcttggcgacattgtctgttgcacagcgaccacctgacagacaataggaggatctcattcctttgagagtggatgatccacagcgttgactgccaaaatggcatcgaccaggtcttttaacgaacgcgcaagtctatcgagctgttttcaggaacttgcaaaagttacaacgatcaatccgcgctttaatctcgaccatttatcggcgctgtccagatcctagccgagacgggcatctatatgtttccgatcgccacaccaccttaatgctcaaatctgaaattgagcctcttattccccttgtccgtcgtcgtcgccaggtagtgcgccttttcttcctgcgtccaagcgtcccagatacgcgcccgggaacggttcttgatgatatagtacagtttagccaaggcgaacaagacgagattgccgacgacgatgccgaggaggaccttgtttcctcgcttgtattgaggtgcgtcgcctatcaccgtccgggcgtcagcggatgctctctacgcacgaatcgatgcggtcggacgtcggggcgtcgtactcactcgttcgatagatgttcgaggcgaccagcgatgaagcctggacgaacatgttgtataacgagctggcgacggtcctggtgcgaaccgaaccggcgttctgtgaggtcggtcagtatgatgttcaacattcgcaatgaagccgactacctaccgagctttgcatcgagaccaagatcggatgggcgtacgggtatcccagtaaaagcgagaggatcgcccatttggcccatttgctggtcgaatcgggaatagccacgaggacgacgaggaagatgacttgccaccagcttcctagcgaggcgataccgagacgttccttgaaccgcttgctcgagaacgagatggccaggttgttgaggatgaacaagatcgagctcgggatggttaagaggttcgtgtgaaacgtgttgaaaccgctacatagggtggtggtcggtcggtatgaagtcacgccaacatgctgctcacgtccctcaactcacagacttcgtagggttagcgtaaaatacgctccgaccgtggcgggcgcgatatacgtagtcaagccgagcttcatcaccatcgtccctcctcgtcagctcgcgagtcatctttagtcgaccttcctaccaatctcggaacgtaccagatagacgggccacatgtcaaagtccgcgagcgatcgtctcaggtctgtcaacgagagaccctcgcggttgtgcatgtccgacttggtgggatcgtctcgtagcactcggttgacgatgatcgtctcttcccgcgccgtgaaccagggtttgcttctccatcgggtcaccgtctgagtcggtgaggctgggaggtagaaaaaggcgaatacgccgatgaagaaagtgaggatcccctcgagcatgaacagccagctatggacccgaagtcatgaagactcagtcgagcaacgacagatagatctcgacgtcatcactcacgcccatccgggaagtcctgcgatacctctcatcttcaaaagccctgcggcgagtagagccccaatgatgttggtcgcggtcaaggtgacccagaagaaactcaaccggatggtgagttcggcagcggcttcgcggacacgcagaagtcagcagcgatccggtaagaatagtatgtccaactcactgtaatagtagctcaagtacaagatagtatccgcgatgaacccaccctcgatcagaccgagcagagcccgcgtgacgaaaaacccagtcttgtttttcagggcgaattgagccatagccacgagagaccagctcatcatttggatcgggatccatacatccgagccgagctttttcgagactatgaatcggctctggtataagcttcgagcgagaggagagaatgttgcccggctgtacttactcaactgggaaggcaactcggcggccaagaaactgacgtaaaagatggtcattccggtgttatctagtgcaggggggaaaccgttggtcacatcccctggattcgagtcaggcgctcaatgacccacaatcattagtgctcatgtgtaggtctttgatgaagttgtcggatagagcgtttgaaatctaagaagatgcatgagatgaaaacatcagctttgtttcagtcgaggtgaagtgtagacgtcgagctcacattgcctcgatccagctggagggccgcaaaacagacacaagccacaaaagcgactttcagatctgcgtaattatttttcgaaggtcagttcaccagaacgttccgtctgaaaatgtcgctcgcacgcaccgagtctccggatgattttcctctcttcctgcttggtccaggtggccttgggatcccatcgatgtttggactcgtatgagtcgggtggtacaaagaatctttatcgtgcaacgtgacatcaggttagcctggacgtcctctatgatgtttatggcgacgctcagtctcacttgttgacgagatcctcctcggacgagtgagcagaggagctcgcatagccagcgtcgtgcttggcagagtcgtcgattccaagactcttctcatcgtcagagtctcgaggcgaatcggaagaagctgaccgtacccggacgtttatggggtccacgacggtgacgccgtgagtgtctaccacaacaggagcggggattgacatgtcgaggagaagtcgtcgagaggtcgttgtccacggatattactttagaatgatcagagccagtccaccttccggaaagacctattcacagtcatgaacttatacctgcgactctttacctaggctaaacggctgagcgatagaatggtctttcgtcggtagcaaagcacgtttcatacgacctttgcgagtgatgtgattgatcaggcaaacaaattcccctatttgagtatggcgagtgattgatctcgccatactgatcgtccagctcgtcctgtgtgagcgcccaaggatttgaacgacatcctgtcgttcgacaagccttctgacaaggcgacaacgtgaaatcccaagcgccgacgtgagcgagctaatttgagtatattcctgttacaaatgagaaaccagcttcggtcccgagatgacgcgatgcgacaagcgcgcgaacaagctgaatgacgtgctcccgatagatgtcgccattgactgactttgagaccggaacccgcaccgctatcgatacgatcaggtcgaaatccttgcaggagacagatgtaagacgcccgaacttttgcccttccagtcgatgtatcatcacgatccaccggaatgagatcatcaaagcacgacgtagagtaatgtcgccatgtcgacggtatatcttcggcattggctcgcacctcatcggcgttgtcacgcgtctcagttgagcaacgtcgacgtggagaaccacatacgccaagtagaatataaaatagggtcgtggcatcgcgaacaggctggtagtccaacggattgaacatggctagccaagcaagcttcgatacaagaccttgtccaactgcaccaatatgcccgtcgccacacagcaaaccccgcattcgaccgtcgacgcgatcaagtcgtccctcaaagccgtagctctcggcgagccgacgcatctgacgtcgcagagtgccgactcttccaaactcacccgtgcatacgctagctttgacgcgaccccctcgactggtaccgagttccgaagtgtttcgacggatggcagaccaaccttgagtatcagggacgtcctcgataacgaacagaaattggctcaactgggcaaactggtgtaggttccagtatcgatccgtgtgtcactgaatcgaagcctgactttggccaacttgctaggtccgaacgcggagtggtgttcttccgcgacgccgtcatcagtcccgaagaacagatcatccttgttgacaagctcggtcggctcggcggtaaaccccaggatagcacgcttcacattcaccctctgacgctcgagggtggcaagtatggcgacgagatctcggtcatctcgaacgagtacgtgtttgacagcaagttcgagaggcccaagcggttgagagtcaagggggatacgctttgggtgagcgcgtgatgcgtcgtcagatatgagctacagatcagtgtcttacgatttgacatcgtgttgcagcactcggacgtcactttcgagaccaagccctcggactatgcttctcttcagatcaggacgttccccgctgtaggaggagacacattgtgggcgtaagtgtcgtctgccgagtaaatcaagtttccttgacttaccatctcatcaacctcgatcctggcagctcggcctacgaggcgtacgaccgactatcgccctactaccagaaattcctggagggcttgacggcgttgcattctgcgccattctttgtcgattctgccaaggccaagggtgtcccagtacgcgagaaccgtgggtctcccgacaacaaaggccaacacctctccacatcccatccggtcatcaggacgaaccctgtgactggctggaagggtctttttgtcaaccgcggcttcaccaagaagatcaacgagctcaatcaggacgaatcggacaacgtgctcgagtttctctgggcacacgtcgcagcggtacgtagaaagcctcaagcgtaacaccggacggatcactgatgatacgcgtatgtgtagaaccacgacttgcaggcgagattccgctgggagcctaacaatctggcgatctgggacaacagaagcgctttccgtgagtactcgaggtagcgaccgtcgtctgaatcgccgttgacggtcgtgaatagatgccgccacgtacgatctcggagacgacgtgagaatcggcacaaggtccgtctcagtcggagaaaagccctaccttgatcctgcttccaaaagcaggcgtgaagacttggattcaagggcttgacatggccgcatccgagtcatggacagtttgagatttcgttcgtaccgcctctatgcctgactgtatactaccaatatattgtacgactaaaagagcgacttacggagcgcttccgtgtttctctgataacaaatgagatatgatacgagaccgttcaagcgctagaagctccgagtcgagtcatcgcgtcattccgagtcacgtgaccccagttccgctcctctcacagctcgtcgcccgaggccggcgttcgaagctggttagcctaggataacaaccatagatgggcccaacgagcaacctgtgtcatcacatcaggcatcacaacgatatggttgatgcacgttagcacgtggaagccatgtctgcgcctcccaaaatgtatcaacacccgtctaggggattgatgttgcggcccggccaggcgtgagttttggtacacccgttcgatgtttagtaaacctattctgatatgaagatggccatctacacgccaaagctgcgatgagtgtcgaggagtcaaggtgactacagagccgatcagttgctccagatcgtatcacctttatgttgtactcgtgctaattagtggacctgctcctctgcccccaccttgcctttcacgaacagagccgatgtctgcggatcccttccgccggacccgacagcgggttggggcaagtatgtgacaggtgtctccggatgggaatcaattgtgtgtattcagcgacgagtcgtgcggcgaggcgacggatggccgttacggtagcctcggtggatgaaacacgacggcaagttcacgaccacaactgcacgacatcagacgttttctgacctttgccccatcgctcagaccacgcaacgccccagaaagtctaagagataacacaggaacgccgagtattgcacgtcgagatcgtctgccgatcggtgacgccggttcttcggtcagacaatcaaccacagcagatctagcgggatttccgtcggacgaggttcgtctacacgagtccagccatcgcccttatgatcatcgccatcctcacacggatctagaagtcgagacccacctggatccagggaacatcgcgatcgataacagcggtcccacggacgggttctcgatagacgagaatcgtcgatccatcgtctacgatctggaagctttgggcatcctgaacacgatcgagagcgaatggttgttcaatcagtaagtggaacactgcttcctggatgtcgactatcgttggcactccgacgactgactcccggcgatgacagattcactcgatatctgagcccattgattgtccttttagactcagaatgtgaggattctcggcgtacaacgactggtctgatctcactcaagcgatgtcgtctgtcatatagtacacacattggcgttcgtcaagaataggcaacccacactctttcttgcaatcatgttcgccgcgagcaggttcttccatcccgcaacccatccatccatcaagcagcttttggagaacaagatcgccgaggcgagcaagactggaaattgccacattgccacgattcaggccattatcattctggtcttttggcaagaaccggacgatcgatcggtctggttaaagtcgggtctggctatacgcatggcataccaggcaggcttgcacaaggcacccaacgtgtcgccaacagatcggacgaccggtgacgtacggtatctgagggtgagccaacgcgtgtctgtgattaggaaggtcgaaaatgtgacattcggcatcatgctctgttgtatagaatgggcagcgcacttggtactgcaagtcgctttggcaatcttttgtcgacaagttcagcaagctgacatcgcttgtcaaccgatttgtgcatgcttcatcaggtctgatatgtaagctgataaatagtcggcccgaggaaacgacgtgctgatcgcaacgacgttaccgctttggcaggcgtagatcgctagtaagtctgttcgcgacgagttgcgacgatctcgtgaagctgaagtgagacatcgatagttacaggtacgacgaagttgccctgctcgaatggttcccaactcatccacgtacagtcacattttcaagctcccacatgctattcgtgacgacccattttgttaggtctgagacaatgggccgcagattcgttccctcctactgtcgcgatcgaccatcatctcgcttgttccctcgagtaagtcctgctgcttcccccacacaatgatcatacaacgatatgtgcaccttgccacacctctgcctaggctcgctccgttgctcaaagcgcacgaagaagcgactcgcatgggaccaatatccggtgctcgactcgatctccaacaagtaacagagatcaggcgactgcatcaggcctgtcaccagtattggctcgtggatcacgcaaacaagtttgggcccgaatctttcagactactcttgagccatagtacgatcctgagctgcgacaacagctttgcacgtcacttcctcgacgttagtgatgcgtcccgcaacgaatggatcgacgcatgcttggtcgctctagggactgtctcggaaacttcgaagcggaacgatctagagtattggtgtgtctctgcttttacccatatatcccggtttgcaacaatgttgtttgcggtatgtacatcgacgtgcattatcgcgcggacgtgtgactaattcgggatcgctcaggtgatgccattttgtgacatcacgcaactgagagacatcaaagaactcgccgatgccatgatcgaggcgggagcatcaaatcagcgtctctcggtgggtgacacctggagccgagtcatgacctactacgctcgactccgcgacgctttatccgatcgtctcgccgatatgactatgcgccaggaggcggacccagggtcctttatcgaaccggtacgcaggacgtttgaacaagaatactatcccggccatatccacgggcctgacgcagtctaagcaaacagcccggaaagcatctaaatgacacggacctcgaaggagctggtccccaatcgtccgattggacagatccattgtggtgagtagtgatagaatccgttaaaggagataatatcgttggtaattcgtactggactgataatgacgagatcgacttgaatctcaacaacaggctttatatgtccgccgaggaagtcggagacaattttcttgacttccttccgtcgacgtagcgggtccggcgaggggatacgctgccattctcacaaaccgacatcggacggcatgccatgcaatactccatatctccatggtcgaagctggttcctggctcgatctatggacaggctacaattcgtatccgctcgatacgacctacgccacgccagcctgtgcccaacgtagagccaggaggaactcctgcgccgcggccattactccgtgtgagcaggggtatcggcatacaggctgttaccaaatccttctgggtatctatcaccgtcaacttcggcggcttggatgaccgtacgaagctggtcgagttgctcgagatggacctgcccactcgcaaagttctcctccaagtacttgatcctggttgtactacaggcagtatgttgtgatgggagtcaatatgaggcaacctctgcatgtgattaggtcaagcttacccgggtataccgaataccatgtccccccgtgtcagtaaccaggccagcgtgagttgacccgcggtgcatcccttgcccttggcgatttcggtaaatgcgtctaccaccttgaggctcttggggaagttctatgcgaaaacacgggaggcgatgtcagatttcagctcgatgcgcagaaatgctggtgtgctccgagaaaatctgcgcttacctcttggctgaatcgcgggaaccacctacgaccatcgtcttcggccagatcatcgaccgatctgtatcttcccgtcatcatcccccggcctatattttcgagtgtatcggaggccacgcatcagaggcagtcgtaccgatgatgccgcccgggcctgacttaccgagtggactgtaggcgactagagcgattcccaactcttcgcatgcttttttgacgccgaagcgctcatcatcgtccagctcgcattcgagtgagaacggggagtactcgagttggaccgcgtcgacgtgagcgactttcacggcccgacggagggtggtcgccgatacctctgaaagaccgatatgagcgatctttccttggctacgagcgcagaatggcagtcccgtcagtttgttttgacagcaagagtgcaaagtggccgcgcctttggcctcacctcttaagtcccagcaatgcctgcatggtcttttcgattggagtcactccatcgactcgatgactgatgatcgcaaagtaagaagctccgcatcagtgctatccccaagcagatctgcccagtcttgacttgccagtaatacaagtcgacgtgatccgtcccgagcttttgcagactctgttcgatcgcgaatttgatgtattcgggcgaggagtcgttctcggtattgttattcttgtacgaaaacttcgtcgccaagaatatttgagagcgagcatctggtcgagatatgaagtatcggccgagcatctcctcgttatcaccgtacatatcagcggcttgagatgttgcaatcagtattagttgctggctgggatcaaggcgccaggctcagcatggtgactcactatcccagaaggtctcgcctatggcgagcgctcggtcgagaacctcgaacctttgctggtctgaccctcctgctccgtagaacacgctcatgcccatgagtccgagtccgatgcgagggatcataggaccccgagacccgagacgggcctttgggatggttcgattatcaggacgggtcgacatattggggtgtttatggcagagtaggacgatgttcaatgtctggtcacgatgttaacatgggggccgcttttcatcaacaggcatcatatctagtttatatctgtgccgcgattcctttcactcttatcgaacgaggcgcttaccgagtctaaccttaaccgacctccgcgtctccgtggactccgaaacctccgagatctccggagaagtgtcgccgagagggaagcattcagccaggtggaggtcacctaccgtgatcatacatcgcaggcttcgcagatcatgttaccaaccaacaaacgatatggacggaggttttaaaggcggagtaagtcatattatcaagcaacgctacggaggaattatcgttcgaacctcgtatcccgccaagcccatgcctgatgtctgagcgatacacgagtataataaggcccgagtgttcgaccatccaggacatgggagtcgttttgacctttctgacttcatagcaactcagcacactagccacaccacacttcgaccaacaaacatgtcgatcctgacagcgctcgtcggctccagtgagaccgggtcccgtttgggaaggaccgtgctcctcaagtgagcatcgaatgcgagcgttgagatgacgccgcgactgaaattcaaccgtcagttatgctctacaggccatgtttgcctcggtcgggataccactccaaacctcctatttctacgacctcggaactgcgatcggcttttgtgcaaccgcggctttttcgctgttctatcctgccatgacacgggtagcggaaagcgcggccgtcgatgggctgttccactccaagaccacgacgctggtgcgcgctaccttgtcgaacaccgtcaacgtgctgagtgtgcgtcagatcgtaatggccagcatgatcacgatctgggcgataagattcgcgagcttgcatttcaacgtgagaggatcaaggtgcgagcatggtcctcacgtcgacctgaaccaattgcatgatgacagcgcatcctcaaacatggagaagattcccgattcgacgagatcaaacgacacccaaagacctttgctggcgcatggacgggccaagcgacttggatagttctcagtagtatgcccctgtggctcgtcaacaatgttgccgccaaccgacaacctcgctttggtacagtctttgactgtttaggggtcgccgtgtggatcgttggttttgctgtagaattcgtagcagaccatcgtacgtgcggaagccagaccgtcttgatcgctggattccactgacgattgactcgcctacgacttgttgatcagaaaaatcggtatggagagccgcaaaagatgccaaacggcatgatgaacggttcatcaggacaggactgtggagctggagtcgacaccccaagtgagcaaagtggttgacctacgaagaccctaaatttgacgctgcaaatgatgtccagctatgccggagaaatcgtactgtgggcgggtctatcaatcttggccgtcactccgctcgcaagcggtttcacatcccactccatcaagtcgcaaatcctttcgggtcttcggctgatggcagcatcgattcctccaatcttcgaatacatcgcactctactacgctaccggagtgccgccattggaagaagcggccatgcgcaagtggggcaacgaccccttgtggcaggaatatgtcagcaaggtacccgtcttatttgcctggcccggatccaagatctagctcgattcggtcggtatcacgcataccctacccggcatttgtacccgcttgcgacctgatgcttgaccgttcaccgttcacatccggagaatagcagttggcttgtcttgtagtagagtatatgcatcgcgattgttgtttcaaacctgaatcattacaattacacgtcttgtaagcgatacagcgactgcgtgagacgaaactgtttctttgaacaaacaacgacttcctcttggttttctctctgtttttccttcatttttgcagacgaaaagctcttggtcgcttcgatcgcttctagctgttgatcacctcggctaacacgtttacgacgtccacatctcgtggaaccaccttgctaatccggtgcgcttgttttcgaccttgttttcttcttcccgcaaatcttcggcatcgaaagctcgtacaccggtgacgagatcgacttcgcttgcgggcaagaatttgaagctcttgtacttggtacagtagacaacccatgcgacgaatgccgcggggaacgccacgtagttggtcacgactaggaacgataggggtcaacgatcaaactagggtaaaagcgaatgatcttgaacgagacttgcagttcttgacgacaaagtgaggcacaaacgaatcgaaaccctctgtcatcagcaagaagaatctatcagacgatcactccccagtcgatctatttcttccattactacttactaaggaacgaaatgatggtagtccaaattctgtcaataggaaagcataagtcacgttggacgatctcactcaggggttcgagatcactcacagcccataccatgacagagcggcaccttgattattccagcggctagcatatggcagatcctttcgctggtagccttgagctttgcatgcggcgtggaaacgaatgtgagagagaaaaatgttgatcctgtggtcctcgcaaattgttcgagtctcaattttccggtaaatccatcgcctcctatgctcaccaggctattttcaacatgatcgatgagtatcaggaacattcccagcgagggtgttttcccaaactcactcaaactggataacaacgtcgtggtattgacaaagagcttgaagtctgaatgccgaaaagcaacggatcagtcacctttcgcaaagataaacccttgccttgccctactcttgaaagcgtcggccgagacattggtgaaagcaatgcatgagaacgtgatcgacacagacatggcaatccagggggtgcctcgcttgtttgtcctcaagaaaattctgggagcgttgccatctcgcgccatgttgtagagtgtccttgaattgacatagacatcgctgttggccgccgagaagacaaagactgggcacgcccgacgacagactattggtatggctcgagacgcacggaatggagcggaaaccctggaactcactcaggatggcggcgttgataatgtgaggcaaaaccttgatccctctgatgaagaaagcggtcgtcagtctcgccccggtatcctagcgacatgacttgtgcacttgcgcgatattgatcgccacgacaaaaggagaagcgttcgctccggtcttggcgccggtggcggcgagcaggaagttgctgttggcggggactatagatgcaagcataccagccccattagattcagctgcgatcagcaaaaatgatctcacctatcagcccgactatgaagatggtcccgcaatagaagatgacgatacgccagaaacaggctctaaccgcgcgtgggactgcatcgataggtgctcaatcggtacggatcttcgaatcaagagcatgtgaacctaccgttcctgcgggggttgcgcatctcgccgatggcaattccgaccatctcagtaccggtataagagtataacgcagacgtgatcgcgtagagaaagccaaaaaagtgacctttcgcgccgggatacaggtaggtggaaaatgggaaatctcgccaggtcctgaaacccatgcgatccttgttgggaccgcctccgagatccaaaacgattccaagtatgatgagcccggacagcgtggtgatcttgaaagtggagcaccagaactcgaactcgccaaactgtcacagacgcaggtgattcagttgacctggccaatatcctatcctccggtcgggcgatactgaccacccgaactcccagcaattgtattccagtaatggcgacgatcaggacagcaatccagatgccattactgacctttgcggcaggtacccaatactgagtcatcgtgggtctttagtaggatcgcctttaaggctcctcaagcattttatagcaacgtacgttgagaacgaccgcacaggctgataactgcgacggggtggtaactaggtatctggaggacaacggacttagcttcggacccagcgcgcccgggccagtgctcacttcatgtagtacacaaacccagtcataccacctgtagaaacattgatgaggtgtaaacgtagcacatgtgcgttagatgcgagataatcaatagtgactcaccccaaccttcagactagttcgcggaggagattagcgtcagtttctcaccgactttttgcgggttcggtttgtctacgcaccacgaaacgagacgcatgacccggaaatccacgctgatgagctgagtaacaaatcatcccgtcaggttgagccgcggtgcttcggcttagtatcgaaaaccaacgtagaaaagcagccatctagcatggaacacattgggaagaatgagtacagccatatgggattgcgccgccgcacgtgctcgagactaacctctcccaatccgcacatcatggcatagcagatagtccccatgaaacagaaggcaatgaacaaacctttgttcggaaataggtcgacctttagcatcaggattttaccggcgaccttggagtatgtgctacttactaactggccctccccgagcgagtccgacaccgctaccaatgacgagacctgtgccgatggccccaccgatagccaacatgctcgcatgtcgcgattttaactctcgcttcaactcgttgccgtcaccttcgtgatccgccgagatgataatatcgggatcgtcccgcccagcttcaacccgtacatgcgccgttccttccacgaagtagtcccccttgacatcgtcaagggcatgttcccatttgtcgcttgatgaggagtgttccattatgagaggtttggcggcaactatccagctgcttctgagtctgccgatactatcaaggagttcgaagtgacaagccgacccttgcaaggtatattaaatagccttcgccattgcgcttcgctcgtcgggatccttgcgcgactccgaatcggtacgccacacacattccgatgacgatcggagagttgcgctatctccgagttttctcggagacacggaaccagatcagcaaatcattcgattgattcgggaatggtttctcttttgaccagccgtatgatagtcccgagtccacaacggcacgttgccccaagtttgctattacaaaagtgactataaacagacacctccgtctctgactgatcgttccaactctccatttctagaccctccacttctcactttgccaaacaccgcaattcgacgagcttttatccgtttcaacatgatgttgccaacccaaaccatgacccggcacgagcttttaccccgaccgagcaaggaggacctctgcgcggcttttgtcggcaagtctctcgactcggttcgttcgccagctgccgtgatcgaccgcgcgatctatcgcgaaaactgctctcggatgggccgacttatcaaggataacgcatatcgatttcggtgccacatcaagacgcacaagacgatcgagggggtccggattcagctcgatcatgggagtctctcgaaatcgatcgtctgttcgactttggccgaatgctggttcatcgctaagagcagtctcatcgccgagcgggtcgtcgaggacgtgagtcaagccaagattgatcttgcgccggcgccgctcacaatatgctaccttccttcagatatgttatggctttccaatcggacccgatcgcctcgatgatattgccgccctgagcgatctcctggcgcaacatggagcccaattccgcgtctttgttgataccctcgcccaggtcgaacagctcgaccagtatgcacaatcgcatgacagaaagtcaccctggacagtcttcatcaaggtcgatggtggatacaggttagttaccggtctgaccgatatccatcgaagttgcaaacagcagctgacaagcctctttatccatcgagccatacagtcgagcaggactcgaagccggaagtcgagccatgacaaagctcatctcggccgcgatcaacgccgagcatgtaaacatctttggcttttattcccatttcggtcgcaagtcatctttgtaccggggctgatgttgagtctttgccgaccactgacctctttgccgatacagactcttacaagtcacgctccgccgattcggccatcggctatctgcaggacgagattgcctgtgccaacgaggcggctggtactgccatcgagcttctcggaggtcccccctcagaaccgtttgtcctttctttcggagccacgcccactgctcaagttgcggaccacttccgatcaatcgagctcaacggagttctcgaactgtgagtccggccggtgaccggtccgtgccggaatcctttcctgaaactgcatgtcctcgtcatagtcatgccggcaattactgttgccttgatctacagcagctctccaccaatatcgtatctcaaagcgatattgccgtctcggtccacgcccgcgtcatctcgacctatccctcccgagccaacggcgaagtgttgatcgacgcgggcggattggcgatgagcaaggacactggtccgttcccggaagtaggacgtgtcatctcgccttcccatctaaacgattggaacgtatcacgggtatcccaggagcatgggatcctggttcgttccggagatcgtggtcgaagcacgagcgaaactagaccggtagctggggacgtcttgagagtggtcggtcaacacgcctgcatgatcctcgctgctcatccttggtactatgtagtcgaaggggacgacgtgattcgagacgtctgggttccggtcaaagggtggtagttgttgtggaacattctgtacgataattcgagttgtcatctaagcgtaccctttgtgaaaccccagaatcttgtaaatttaccgcttttggcgagtccgacatgtcatggtcagcctggtggctgctggcgtccagctcccacttctccgcatcagtaaaagtcacattcgctattcgagagaacgatgagcttgaagatcagtgatgagtgggattgcgctcatagacctcgattcgggtgcaaagaggatcgagaagaagcttccgatctcgtgatcatttcatatgcgtggatgatatatataggtcaactccgactgatctcggaggataacgacttgcgacgcagtccatcgagacaagacgaccgagacacgcataatcccttatcgtcacaaagctttgtgtcgggtcatcaccagcaggccatgtcttctccctcaagggcaaccgctgttcggccatccgctactgaaggcgaacagaccccgtctggtagacaaagatcgcgctcgactagaccggtaatcaagtcctgtgcagagtgcaggaggtcgaagctcaagtcagtatcgacaagcatgcgaaaaggctgttgaggacagttgtctgacccgggagccgtcctgcgtaaagatgtgatcggacgtttccttgtacaaactgtcggacccggggactgagtccgtaagtggcacatagctcatcgatctttatgagatttgcgacggaactcatcagtcctgtcacatccagcatctgtccggacggcacgcttggagacgtcacagagaagaggtacgtctagtttcttcacgctggcgaatcgagctgaacttgcctacccacgtcgatttccaggacgaggctagctcagttggcgagactacagagtcaggtcgctcaattacagcaagaattggatcatgaacgccaacgtcgtgggcgatcgaccgccatggaagtcccgggtgatgcgagcagcaggggccaagtcgagaccgtggccgagggattgatgggagctgccgatttgaacgctgatgtgttagcacaaacaccggattctcctttggctatgtcaaatcttgatccggtgcaggacacgactcgagtcgggatccaagcgttcaacagtagtgtttccagctcgtcgatgatcaggcgggacggatcccatttttacggtggagcgggcagtgcatacctgctggtgagtatatcatattcacgactaaccagtattcgctgatggaccactttgttgcctaggatgtggacgatggtgatgatgccaatgtatacagcagaattgatccgggctcggagcagggcgtacacacgagcagcacgggtatgcagattggggtatctgcgaatccaaacatggcgactaccaagcaatcaggacagcaagaggtgccgtgcctctctcattcggtgattctacgcccatccgagcaagagtgtcacaacgtcgccctcgatatacacaatcagctaccggagagagaagacgcctggagtctgactcgcaattattttcgggtgagctcggcgtctccgcccacaccccggctttcagtgaagcatcgactgacgtctgttgccttgttgaacattaagaacggcgcttggatgttcgacatcgtctcggagcaagaattcctcgacgacgtcttcttccccacgtatggcaatgaacgagcgaagtcggcggatccggacaaactccaaatgcttgcactgctgtgcatggtgttggcattaggtgccctctttgacttgaatctgccaccatgtcggttctcaccatcaaagctacggtcaggaaaagtcagctgatagtgccgccaaatcactggtccttagataaccgagcagctgcgcaatatttctcgttagcccaactagccctttcaaaaggcgagtccagttttgcaacatcaacaggtacatgaacacactgctgacgtatacgtcaacagattccagtccatccatactctcgattcaggtcaagcatctgcaagtcatgccgcgattgacacgtcacatacgagctagacctaacgacagcactctcaaatggcaggacgggttcttaccttctcaattgcgggccgtctcgatccggaggaagctcattctggcctttgttaggctcgatggtgaaggacgtccagtccgtgagttactcgagcactggtagacgcagtcatctgatgcggttggtttctcatatattcccgcatcgattactgttctggattggatagatcgggctacaccgtgatccagccgttctctgcctagaaccctcgaatcatcgccagcgtcggagagccttttgggaagtgagtgtcgatagtccagatcgcttccataccctgagtgtcaatatccacctcccatctcaggtgtacacgtacgatactctgcaaagctttactcaagggagacctcattgtgaatatcggtcagacttgacttttctgcgccgagcgactgtctcagctaatctatctgaattctcaaaggtttccgggaagacactttcgacacgagaacaccggacgactggcctgtggaacgtggccaaagcgacctttgtaggtcatcagtggccgtgtccttgatgctcagagcaggcatgtctgacccgttgtccttatatagttcatgatctcaaggtacgagtttctgctttcatccattcggctatgcgggctaaatggaacatcactgtagtatcgcttcgtctcgctgttgaccgaggtcaatttattgcaatgttcgatccgacaaatcgaaccaacagcaattgtcaaccttgataccaagatacgcgcttgtcagtcaagcgctacggctattcgaacgaaatctcaagcttagacctggtggtcttgcagttacagacttgattccggatctaggaccgatgctagactttaggtgagacctggacatacacgtcgcaacgtaagcagccgctcgattgtcatctgaagcactcctctatagcaaggaccgcctgtcagagtccaccattcggacaacggcgatacaaaaggccatgctggagatgtttgtcgaagaagcgtgagtgactaggtcggcgctattatcgcagtaaaccaagctgaggtcgactttccctcgctggcgtcccagtttggtgcatctccatcgggcaggctttgcatctcaccttcgctaccactgtctcggtcacgactcgctagcgttcaggtgatttttttatctcccttaatatttgcacaacactgatagacgctgcaggggcaactacctgtgcgagttgcaggcttcgaggcgactgatcaacgtactgaacttgttgggtgagcaggatacaattcgttgcgtgcatgcatgtcgatactgacaatccccaaatctagaatcccaccacaaaacgttggccagtcgcttttggttcttctcagtttgttactttgaccagctagcgacgagacgtgttctgatcgttgtttgatgcttggaatgttctttttgctccgcacagttccacctgttctcggcgtgtgtcagcctaggcgtagctctagcttttggtccgaaccaactacatcaaccggaagacgctgacacatgggcagtcggtcgctctacctttgagacgtttaaccctgttcctcgaaggaaagaaactgtgagtgcatcagtagcaaggggatctttgatcgccaaatgacccatgatgccatttcctcttgtgtcatagcaaatcctgcacgtcctgcactgtcgtaaggatcacttgaatagctagacagatggcgtgttgcgtggttctatttactgaagcccctcgtgcatcgtcttacagtacatgtcaagaggatatcagagacggagaaccgagcgcacgtgcctgtcgaagtcattgaccgccttctcggcctggtcggtgccaagatcccgaccgctcgggcatcgagtgaacccccacagccggatgcggaagtatcgatatctttacaggattccacgatcatttcgaatcaggatcgacaaccggatgctatattgagcgactgggacggtgccggtgtctcatggaacggaactttcgccgagtcggaggatctgttggcaatgttcgggctggacgcaatcgattgggatgatcatgtaccgtggttgactggtgcatgaacacatcgtatggtataattttgaacgccagtctacacccaagacaaccccctgtgacgcgaggctcacgtgtgtttcagctggtttgcgatattaacgtgccgagggaaacgcagcaatacacgtgatctcgacgtccgttccttgaggcaaatccctgacctgtaacagcgttggcgcatgatgggtcagttgcggtcgacccggacggtggaagaagtagcacccactcctatacacgttctggacggcttgggatcgggaaatcctgcgatgtaagctttgttgaagtacgaaaagtttttttggtagtcggtaagataaacggtgaccgatacgactatagcaggagattgtcaaagccaattcgttcagagctcgttcatccaatccccaccacgaccgactaaccatctttcagagtgagttgcaccgcggcgagagcgtgttcaatccatcggagggaaaacgtcgtgcggtccgcgacgctgccttctgaggtatcgcctggagcatgcgcgcccgaaacccagcacaatccggcagacgggcaaggcgcggcgatgtccaggtagaatggcttgggtgcggctccgctgatgacctgtggaaacaaggtgagcgggatgattttcagttagggcgaacatggagatcaatcagcgaagccagctcacatcgctcggtcgttccatggcttgctgcgccggatgagttctcaccgcgacgctgagggaaagggtccgagacaaatagagtcagggataaacttgtggacatgtaccaaatcgctcaccagctcaattcgattcgactgcatggagaaaattcgttacctctcgctacgggtcctggagctgtcgactgcacttacccgtgagataatgcctgcactcccacgcatgtccgggttggcttgtacatgcggccgcgaatacccaactcgtcgagatacaagtcgttcagggaaagtatgtcatcattgtatttgctgagatgaatcatgaccgacgagactgtagcagattagtggaggtcagcactggtgtgtggagatggccagtttcgagatacccactgttctcgacggtcatgccgttccgagctaatagactcttcagtcgatcgatgatctcgtgcagttcttgaggaaaacttgcaccctgggaacaggccggtgcagccaggcctgacacaaacatgtactcgtcgatcgatatcgacgtggaacatccacgagatgacatggtctgacaacagagccggatttccaaggtcaattgtagcctcccagctactgcggcggtgctcacctccaaatcaagccggtgtttggtcccaccaaggattgcagtactgtcatacatagttttcaatcagataggctgattgatgagagcagtcgatccaaactcgccatgtcacctcgacgtcggtgtcactaggtaaagcgctcgtctccacgatagtcctagtcggagggatgccgtcaacgaagataccagcgaagacgtgcaggatctgatcgaggtcggaacctaaatctttcaagtagatggtgaccgcaacgactgacccgtggagataccagatgcattcagattgaaggcagatgatagttcgtccacctttccacactcaccattcgaaagcgtagcatccgcttctgtcagtagagcgcgtacattgttcatagcctgatcaaagcggtcggccactgtcccttcgacgaatcgtccatctttgatacccaaggcgcccgacacgaataaagcgtctgcgcttcgcgacagaatggcagacgacaagtgtgcagaagggggaggtgccgagacggccgagaggggcaacttgtgcatggtgtgtaaagggtccgcgagcatttcgaagctatggacagatttgcaacgtatccgacgataagagacgatattccaaccaaacacatgatggtcggctgcccgccttatcatgtacccgtgtcgagggccagcgactctgacccaagtcgcgcccgcgcccggactccgttcggactcgggatcgctgaaaagccaccgaaccactattccgagaatcttcggaaacgctatcgcattacaataatctcgcaggtaagtctgctcgtataaatgggatgaaacgttggtttgaccgccgaacagcaaggtgatagcagaagaacccgttcacctggtaagcgcccatattacgcagatcgaccgataatgcaatacggaccccttcttgccttgctcagctgtctcgcgacgttgacagctgggtcccctatccaagctcgcaacaatacctctagcgggtttcttcccggaactattggcctaaatgtcacctacatagcaccggtcaataggttagcttattctattatgtcgacacttgatttccctcatgttgacccacgtatccaccttcgcagctcgttgccaaatgttgcgatcttcgcgaccgggggtaccatcgcgggtgcatctgcttccagcagcgataccacgacttatacttcgggtgtcgtcggggttgcggcactggtcaaagcggtccccgagatatccaatatcgcgaatatcgagggggtacaagtgagtctgcccgctcgacctgcagctgactcgatcctgaccatccgggacgtcacagatcagcaacattggctcggaatcgatgaattcgaccattctacttggctttgcgaaacaagcagagaagatcttgtgctctagtggttctaccgtggatggtttggtcatcactcatggaaccgatagtatggaagaatcggccttcatgcgtgagtgtcgcgaaacagctcaaggttcgacaagacctcattgtcagagttgacctgacggtctgtttaccagtcgactcgacaatctcgtgcgacaaaccggtcatctttgtaggctcgatgcgtccctcgacggcggtatcggccgacggtcctgccaacttgctccaagctgtgagactggcgacctcgcccgaagccaaaggcaggggggtcatggttaccttgaacgatcgcatcggttcggcgttttatatccagaagaccaacgccaacacgctggacacctttcatgcggaagaacaggggtacctcggagctttcttgaacaatcgaccggtattctattatggtcctacccgctcgaccttttaccaaaggtataatgtctcgggcctcgattcgcttcccaaggtggacatgttgatggggtacgtatcgtgaggaggtctcgtgcaccctgattcttcgtctcatcggttacgcccctgctacgcagccaccaagactttgattgggcgctcattcgctctgccgtagacctgggggccaaggggatcgtcattgcgtctttcggggaaggtacagtttcaggcgtcgctgatctcgaaatcgctcgatggacggcgcagcattatcctatcgttatcgggtccaagacgtgaggcggtcacgttctgaacgcgatgatgttagacgctcgcgctgactgacctcttgaaaccatgcgcagtaacaacggcgcggcagtccccggaaacaatcaaggaatcgcggcgggatacctcaatccggtcaaggccaggcttagattacaactggctcttgcggcgggtcaggattacaagcagatcaggtcgactttcgaggatgagctcttgtcctacatcgcgtgatgcagatcgtcgtgtattcgcagtatcgttggttcaatggtaatcaggctgtcattgtattgcggatcatggtggaggtacttttgtaagatgtcaattctgttgagcttggtaatctcggccccatgtcgataatcattccatttgatgtccgtgatcgaccggcttcttgaagggtcgggacgttaccgggacttttccagactttcgggagcaatcgaagcgacgagacacgttgatcggggggattttgagtggatcttcagcggcagtttgccaggcaacgacgatcgacggggatcttcgagatggttccagagtcagagacggccaataccaacaagcggtctcaacacggacgaggtggaggcaacgccaaatgccacatgcggtggaggatcccggttagtaatccaagtcgttggtaagctgctgaaagatagtcggcgtgctgatgacagtagtagtgtgcctcttgcagccacgcgcgagcaggcaacgagggggaagaaaaaaagtttgccgcggcacgatccactacgtcactgtctgcctgcctccccctccttccctctttgtgacagatgttccgaaagatcgccgtttgagagcatctggacttgaacagcatatatagcgagggtgagatacaagaaactcgtattcttttgacatcatcgttatccgttccacataaaacaatctcccatcacctcatccctaaaaacaacccactaaacatcaacaatgccttctttcaccgttttcaagggatccaaggacggctctgtcgtcaagagcaccaccaccaagtctgatgagcttaccggcgattacgttcgactcaaggtgaccgcctctggtatctgtggtaccgatctccactacgtgagtttctgacaagagcgcacatgacgtcctcatccaatgctgacctcgtgctgctctcgtgtcacagctcaagcaagacatggtcctcggacacgagggagtcgggatcgtcgaggagaccggtcccaacgtcaagtacttgaagaagggagaccgagtcggatggggatacgagaccgacgcctgtggccactgtctcgagtgcctcaagggagaggagatcttctgccccgagcgagccatgtacggatacgccagcccggaccagggtagtttcgccgagggtgccgtctggcgagaggctttcctccaccccatccccgagggcatgtccgacgttgatggtgctcctctccagtgtggaggtgctaccgtcttcaccgccgttcacgacgcccgacccaccgagatcatcggagtcatgggtatgggaggtctcggacacttggccatccagttcgccgccaagatgggatgccgagtcgtctgcctctcgggtaccgacagcaagaaggacgaggccactcgattgggtgcccacgactttatcgccatgaaggacaagaaggccgaggacttgaaggacgcccccaagctcgaccgtctcttggtcaccacctcggcccagcccgactggtccttgatcctgcccatgatggctactcgatccaagatctaccccctctcagtctccgagggcaacttcaccatcccctacatgcccctcatcgccaacggtatcaccatccagggatctttggtcgccacccgatcggtccaccgagagatgttggcctttgccgccctccaccagatcaagcccgtcaccgagaccttccccatgaccgaggagggaatcaaggacgctctcgagaagctccagaacggaaagatccacttcagggccgtcctcgttccccagtagatgttgggagagcggttccctcgtcttgccttgtcatcccggtcgtgtcatagatgcgagccggaccttgtagccaaataataacgactatcgtatagcaatagatgccatgcattccaggaatttagacgagacgggtctgcctatatatatggttcccatccgagaagagtccgcgccttgactacgacacgtgtatgaccctgaagtgtatcgagaccgcatacgagaacagtcacgccacacagaagagtgataacggcaacgcagtcgaaagtggcttaaggcatggcagtgctggagcttgccggtccctcctttgacatgtgactggacgggtttcatgtgcgcccccggtttcaggtatgtaagctcgtcaaacggtatccgagtacatataggttcgccctccccggaaacctttgctggtccttgaattagtcgatgcctttagcaactcaacccactcctacccactgaacgagcatttcttacggcttcgatcatgacttctgactcgactcgtgactgggaaaaagaagaaaggtacggttctagacccgaggattggccttcggataattcggcatcagcgtcgcagaattgtcgaagcgaacagacgtttttccagagacacaagaagaaagtcattgcagccggtgagtgctgacattgcatgtgagcgaagtgctgcgacacctaatcgaaattcctatgcagcgatctctacgattgttattctccttgtcatcgcgggggtcggctatcatctgacagagaaaagaggacaggataccacgctgagcaacgttagcagcaatgggttggaagggtcgaaagcgcaactgagctctttcttgggcgaggactcttcgaccattagccaagcactagccacgggtctagtcaaggaatccacgaccactagtcggccggtagcctcggttttgcctgaggactctacgaccaatagtcaaccagcagccacggatgtagcatgaaccataactgtgccagatcgtacgacgattcgaatgtatcatcgattcatctgctagaaatcgggctactctcttttacatctcgttcgagctttgcaggccatagatcagcgtaatggatgcctgatcgagtatctatgttcccgtgagatgattgaaaaatggcgtgctccccaaccatgatgatgacatccgcccagacgagaggaacgatcataggattagcatacggctgctagagacgaagaagatgtacagataggggctcgtgatctggccgcaacatcccagatcagataggccacgccaaactgaagccatgtacctcggtcgtcttatgccttttcacccttagacagtctgtcccaatccttttcccagggctctttccccatggataagatccagcaaatgaccgcgatcaaggcgaagacgtatccgatgatggtgctgtgagcggcgggtgatttgagtgtctctgcttcgaacgagccgcacgctaaatcacttacctgtaagtgcctagaccaacgtaaatcagctgcgagtcttgcgaggcaggtaccacaatcgcaggtatcccaatcgtcgctaccaaacccaagacgatgtaaagacctgcgatgatatatgcaccgatcgccttgatcgttttggccacgaaaggccatatgaggatcagtagaaacactatgatcgagagcacggcagctgaaacgaggcagtcgtcaatacaggtcggaggcgatgacgacgtaaatctcacccacctaggaactcgaaaaacgccatgatggcaagcgtatgtgcgaccggactggagagatagcattaagacgaattcaagcaaaaggcagttcgccaattcggcaggccagcttactcgggaatccctccgggcaattgttgtgttgagttgtcggtagtccagaaccacttgtatacgcaactgttcatcagagtctagtcagccgaccgacgatggcagagcttgaaactgttacctacgcgttaggcgtcccatagacttgtgcgtccgcctgagcgcaccatccggtcaaaccgaaccgccattcgacgccattacctgagttcttgggctcggccgctaccgaatccctgatgttgatgaacgtatgtactccatctcttgcattaggttccgacgacagcggggttccgttcaacacaggaagcatataggtcactacggcaacgagcgcagcgatcctcgcaagattgatcttccatccgccaaggatctgaaaagctgttttacctcgatcggatgtcttgtcgatgctttgtactctcgtatctgcccatcggccgttccttttccgccctgcttccgcatggccttcgtcaatgaccttgttacgtgccgccgcaactttcccgttgatctgatagttcttggatccggaatttcccatcttcaatggttaaatgtaaaaaaggcaaggggttcgaatgttacgagcaggaactatgcgacatgctcgggcgagatgctgggtaatttcccttctattggaatatgtaccaagtgaatgtgtgaaacccccttgatcgactgaaaggaagtagcagtgtgagagttgaaaccgatcttgcttgaaggagggtcagaggccatgtgctcgtgatcatcaattcattgcgcgatcacgttggtggtccagcgactcagcatgggcatagatatcgcgacttgctcgaccaatcgtatgccttggaattacacctcattataacgcacctggccagaacacccgcagcgagttgttccacgctgcttcagtcacttgtttcacaggtacacccttgacagcggcgaccacccaggctatcgtcgtgatctgtctcggaccagcaaccatcagatgcgtcccatgcaagtcgaaattcaactccaaacttacgtctgcaggttcatttctacctttcacgccagtctgcccacccggcttgagcgtcttagtcttctccaatggcacgtacggaccgtcctttggcaagtatgcgtgagaagcagccgtcgttgtgatcgagcaccaaggagcatctatagcgacaccatagcacggcctcatcagctcacgtgcttgatcgtctgatctgactcggtatcgtacccgtctccagcatgatacgatccagcggtacagctttgacgacgtcgagattttcttgcgtcttcagcgaacacccgttgatcccgatgaacagtccgtactccaactagggacaaaatcgcttttggcgagagcctaataaatcgctttttgatgccgaacttaccagctcctccatctcctctctcgtcccagtgaaactatgcaccactcctgtccttcctctcggctggtcaaccccctttttccagcctgcactgacgaacgcatcgaccagatccttgtgggcgttcggatgacgtgagtgcaggaacatgggcagatcataagtctgggcgagggagaatagccagggaaggtatttattttgcgtttccgcagacgagtgatgtagtcggtcataatctgtgagagcaagcaagggtcggcattgaaacggagcttccgcgaaccggcgcaagacgagctcaccgagaccaatctctcccaccgcgaccaaacgtgaatctccccccttgtcgacttccccacgaatgacgttttccaagctctgcttgtagatttcgaggccttgttcatggctatcgatttcagaggtggaagtcggatgacaccctacggtcgcgtggagatctaccgcaagctgccatatcagcctcgactcacctcgagtagaagctgaggaggggaaagctcaccgtattttctcgccagctctagagcctgtactgaactttccagactggtccctgtaatcatcatcctttcgacacctcggtctcgcgctcgttggaccaccttgtccaggtcggctgtacttgaggagagcaatcaagtcagctagggtaaagtcgaagaattctgagtgcggcattctcaccatcatgtagctgcttccctcgataccgacctgtgaacatgtcatcggtgaggttgacggcgatgtctacgagcagtgacgctgggagatcagtttggattgctcgctaagaccatcacaatcggctcacctgcgaatctcttgggcttggtcgtcatagtagcgagtgtctttgaaatacaaataccggttctcaagcgttgcatgtgtcgaatggtcagcaagtccgatgacgacaaggagcaagatgactatctacatcgaatcgagatacttgttcaactttcggctcagtggacgggttcgtcatcaagagaggtcgcggaacacgggacaccagaactgtttcacgtgatcaacattttggccatctcgtgtttcaaggtcgaaacccggatcaacggcttcgggtgtggaatgatgacgtcgctgcgtcgttgatatgggggtcaagtgcggaaagtgttacgaataagtccgcaccattcataccaatcgaacagagaacaaacctcactactttcccccttacacccttttgaccaaatccccctatcctcttggtcatcctgacacatgacactgacgcacagcctccaccaaacttccctctataaatcatactttcaatcacgcaaggtatacaacaatgtcacgatacaacaagtgaagcggactctggttccactgcataccgtcgagtcgtccaatgcaatcgtgctctatctctcggtcgagaaatcgacgaagctcaacgtggcattcccatgcccaaagctggtggcggaacattcagacttgcgtagggtacttctgccttgccgacagagtaacaatatcttcggtagtctgttcgaatgactggtgagcttgcgggtaagtctcttcatggcaaaatgaagggcttgcctggcttggcaaatgacgggtatctttgtgaaccgtaccccatgacaggtggaatatcgatcgaattgctcaaaggcatggcgttggggtaagccgtatgaggcgtagcgaacggattcattctgacgttatttcccgcaagagccgagaaggtcgtatagtccatcgtgtgcgaaggatcctggggcatcatcatcggtctcatcgtaggttgtggtcccatcattgacggtggaccctccattcccagccctaccgccagctgaggaggcaatgaaccgaagtcccggttcatgtgacgcggcagagacatgtgatgagacaaacccggctggaatcctccgtggtgcgccgaaccatcgtgatattccctcgaacgcatgtccacgtccctccgtcccgatgattcgtgcattgacggcgctctcggtcgatatcgcctgtgttcctggtgataatgatgatgtcccgactgcgattcgccagcgaaagtcgagggcaagtcggccgggtgacgcgaacggggcgaacggtgttcttccgcatggtgccgttccggcgagatcgtctcccgatgatatgacgtgggagatcgcatctgactaggtgatcggtagtaactcctcccatcaccttctaccgagccgctgaatgatgctcgtctttgaggtcctgggatagggatcggtagagcttggggcgagtctcgaggagagatatctggataaggatgcgcttcgggtgaataatgacgcggttgcggagggtagttgtaagacatggctacgggatttactgtatatcctgtacaatctagttgatatcgcaagtatctatcaaacccggacaagtgtcgaagagaaatttcggcgaagccctttataacgagtattcctgccccctttatccttcctcttccgattgtatgctgatcctgacatcctttgttcgcgtgtcaccatgtggcctcgtgctcgcgggggtactgggtcaacgtgcctctcgcgccttcgattactacgcattcctgggtgcgatacgttcttggtcttatagtatggcgtgatcctgtgtcacaatcatgagctgattcgatgccgttccaaggcgtgatcctgatcaaggtcggaccctaggaatagcgagttttttacgtctggatctcgataaggcatatcgaggtcaatgatcatctcccaaatccgattgaaaaggcggtatcggaggatctcgaatcaggcctaggtctcgcctatcaaagaaaccacatcactcaccccagcatggtctcgctatgcaatataatccgagatgtaaatatcccagcattcttgcaaacgaccagggtcaacgtgagttctgccagaacaggtatcatggcgtttgtgaccgagggtgggtcccatgcagacctccgactcgatcacgcaaactgatcacttgggccctagttcaaaacaaggtcaaagggcttggcagtcggaccagcttgtccaaggtgttcagatggcctatacgtaatgtgtgatgtcaagggcgacaagtatttggagataaagaatgtcctctcggcgcacttggagcactggcctacaatcaagaccgaaaccgttcttcatgacacgtcgatattggcgatctcattcgacacggacgacctctactgcatgatctgtggagacaaagagctggcggctagggatttgaggtcggtgtaggagacgtgtcctacacatcctcaagtcgacttgaatctgatgttagctatagagtacgtcatggcgtcattgcacggcaaaatcgttgattcgccagcaagtacgcgagattagagtgaaagatcagtgctgtgtcatcactgctttggcgtctccgctccgccacaaaggatgtatccgagcacgcaagtggacgtttcagcatatcaaaggaatactggacctgatactacggagctcgagatctcaactaggtatggcatatcatatttccctataaattgacccggtgaatcctcgagatggagttccggttgcctacccggctgtcaattggtgctcgtcaacaatgtctgctccgacttacgacgtcattatcactggctgtggcccatcgggaggcactcccagcgtgcggtgtttgactcgacccaaagattcgtctttcccgccttgtaattgctgtttgggtgcggctgatcccgaggacaagttggggtacggagggttgaagaattaccgtaccaacaccagtggcgtggtaatcaagacctggccggacggtcgcaagaggtacgaaagcacgattacctggaagtgttcagtgccagacattatcatactgacggtattaattccagtaccattgtcattgactgtggtaaacagtttcacgaacgcgtctgtaaggtgtttccagagaatgggttacgaaagattgatggtaaacgcaagcttccatcgacttgcgcgcgagtcaattggtttacaccgagttgtgcatagctgtactgctgacccatgagcacgccgatggtgagatcgattattaccaaggaggcggtgcgcaagctaacgaagacgcctgtactgagcagccattctgggtgtcggagaccttcgccactttaccctgcaccaggaaattcaggagtctgtgccagtctggttggatcgagcgacgtacgacatcatgttgtcccgcttcccgtgcgttcacgtccagctgagaatcggcactttgcccaggctcaatcagtatctgcgccgtttaacaggtacctggtcaacgtcggcagcactcgaagcgcgggtcagcagtcgtctctcaaatttcacgtgtttcagtacggcgagacgatcgaaatcgccggtgtggtgagcggggtgttatcagccccattcgatctgcaggctgaccccatatcccggtagaagatccgccctttgcccgtctttcacggatgcgcttccaagaccatcgactctgctaccccgggcgcgccacctgaaatcgtccgcgaaaagatgaccgcggcggcgtttgaattcgacgacgatcagcttctctggatgagcgatgtcaacgagattcctgataccacatggcagcttttcaagcaaccacaaacacaagccgtgattcctcgcaagatcaaagacgagactgaggacgagtacgattccgggtttgatgacgatgccgcggatgtcgcggtcactgcccaaatcgtacgagctcgtccgcctgcagccgacgtgtcgatggccccgttgagcatctcgcaaaccgctgatcactacaagctggtcatcatggacggtaccaacctgaaaggcgaagcggctcatcatgggatcgccgattggatccgtgcgggtcttaggctacgagccgacaagatgatcctcgttcagatcgagcacgccatgagttacggcgagttgtgctctttgggactggagattcagggtgaccgaccggaggggcagcacgacgagtttatcgaccaggtcaaacgattgtgttcgggtcagccgggactgtgggaagaatgcctcgccgacgggttctgggtcagacctgggttcgacggacagcgattccgtattcagcccgatgatgtccccttcgagtactgaacggtcgattacctccgcggaaccgcactttcgtaccctgatgcgactagaatacacatttcattttcacgccgccatgtggaccggatacaggtgtagatagaagaagcatgtcgagtgaattaagtttcgatcaaattgtccatgtccggcctagtacgcctcaatccctgccagacgtctcgtcctctgggtgtgctcgaaaggtttggaagggatcgtcctgacggccgcttgacggttgacgacaacgcgagcgcaagtggggtcgtgcgactgtggtagcaagagaagcaggacgagattagtctcgaatggaagcgagaggatgcaagccgggaatcggactgaccatgttgtagtacttgttggtagcctcttttcgctcctcgagatgctccggcgaacacatatcggcgggtttataacagacgtctataaccgtgggcgaaacattccggaagagtgagcacgacccccgctcgaacggtatcgggaaggacgacccggagaactcacaagtagcatatcgagcgttattaccggtaggggcggcaccgtaatggatacacctcgagtcccacaggatgacatccccggcattggcatcgacgtgctgccaagtacaaccccgatcgtagaaccactggagttgcgaaggggtatggtggtacgaatcgaccttgggccagccgccctcgggttcctcgtgagcgtgggcttcgaaaaactccttgtacagtgggaacgacccggcgaggaccatgagtccaccgtcggtaggtccgttcggtgcgaggttcatgatcccctgaacacagttcagttcccgcttcaaggggctctggtcgacgtggggccagggagcaccgccgttctggatctcttccttgggcaaggggatggaaaagttggctccgtctgcgagtcgccgagtcagtcccctcggacccaggcttgggacgaacgaacagtacgaccagtggactcaccgaaagagacgagcaattcgtccgtcccccagagctcggaaaagaccttgatcaaatcgggctcggcacggatagaccagaggaggtcttcgtgtccgacggccaagtcgttgtacagtccacctcggtggtggggaggcaaattctcgacatgcctatgtgcagagcccgccaagcgaggatcagccatgctgatcgtccgagaaaaccccgagcgcagacgaaaaaaggtgaacttaccaagtggacctgtccttgggatcgaatcccttgccgaacgcctgcaaccattcgttggccctctgaacgtatcgagcggcctggtcctgtttcaagactttggggacgacggcgaacccgttatcccgaagctgcttgatatgctcgggttcttgagcgccggtggctcggagtttgagaacctttccggtcgacacggccggggcggtggtggtttgagtagcgatgggcatggtggtcgaggggtgtatcgagtggatggatcgaagcagaatagtgaccagtttttgcttcgactgactaatctaccaaacgaggtctcgacatggtcccgttgtatatatactcgcccgttcagaggtcgacgatgtcgaaaattctcggagttcggcgttttctcattgattcccggcgttggttcgattcccgatgttgctccgcgtccgggtcaggcggtgggttgttgggaatctttgtacagagccgttgagccgcacgaatcgcccttgccaagatgcggcgagagcaagcatgccgatgaagcaacaccgtacgcagtagccaagacggtcggtcgatcgatcacttgcgtcgtttcggtactgggatgacatgcaattccttcgaatctggcggaacgatgcgggggatcatccgcccggatgtcaacgggttcggcgatcaagggtgggaagaggtggaggttccctcaacgccgagtgcagcgtgaagcggcgccactgggggcgacgcgtaaatgtttcagtcagaaaggcggcgccgactcacctcggccacgactcgaccatgatctcggtgttacactacaccaccacctgctctcttgcttgctactcgctccttatgcattgccggcctggatcacatgtcaccgttccccgagatgaataccgacgagcatggtctacccaagatgtgagccgcgtcggatttcagagccgatggccgaagctgatctatggcgataacaagtgatggaccagcctcggtcagtggtcatctctatcagcgtctaacgctcgcaatgactgaattttcggcccggtggctttataggatacttgggactacctggcatggtgtctcgacagcatcatgaacgggtgagctccattcaaacgtcacctgcaaggttccttacctgacccgaacattatccctctagaaaggcgtctggggtctcattcgagagtctgtaccgtctggtccactccatcgtgatcggcaatcgaccgcgaggtccgaagagtacgttgaatacctcgaatatgaggattctccacactcgaagcgagattgacggtcatctccggatcgtaaagatcaaatgctgggcgagagggagactaatcgacagctagacgagttcttgtcgaactttttcgcttcccacgctagagacatccaacgagtacgtaccgactcttccgtctacatcgaatgtcttctagcccgatcgagctcacattctatcactcgtacgtggaaagaggctggacgggctctcccccggagatcttcccaaagcctataaagccgaatgggacgtctaccgtcgaggaacagaaaagtcatgcaacattttcaagtacagggataaatgcatccagtatggacccgttattcccagaacaggtgatgtcgttgattacacggtggaacaagttgagtcccccccgatggagatgacgagggtcaggttgggggcggggatggggctcacctttttcaattcgggttgttgagctcgggacatggtggtgaggtggcgatgaggtggttggtgggtgttttgagtggtagaaggatggtgatgctgttttgactgctgctactatgcagttgaatgtcgtgacatgcatggttgtcaaggtcaactagcgttgtgggtgtgaaaatagatgaagctagatttatttgcaggggggttaggcgcgcagagacagttgatactcgcgcgcgcgtgttataatcaaaagtaccaccacccacccacccacttgcccctataaaccttacacacacacttactcctcctaccctcacctcggatttcgccatccaaaaaggaacaacctcgatcaccattcacaactccgaacatctcatacaccgccaaactagcacacacagaataccacaccgctcgtgccacttcctctcttgcctttgacacgagctatctctggacccctctctcccctacagatcaaagtcacactcgcggtcgatccggaccagcacttcggtttctccactaccagtagtgacgacgttctatcgactcgatttactcataaattagtatccaacggcctcctcggccttgtcactcacaacatctatataatcaaccttgaacatatcgtcctcatcgacctcgcattcacttgaatcgaacccaaccggaccggaccagatcagatcagatcgacctagtcacccccaactttcctcgtccctccctctctctctctcctcgacaccgcccgcgctccccgccagtcctgccccggtcgatcatggccgaatccatgtgggctccttctaaccggaataaatccaacccgaccctcaagtcgaactctaccgagaaagtgaattcgaaaacgaatccagattcgacacccgcgggtccggcctcgacgacgacgacggcgacgacgacgatgaaggttccaccctcgaaccttcggtcgaatagcgggaaacacgagatccccccacaccagctgcccccctcgaccaccatcagcaccaccgctagcgctgccagctcgacctcgacctcgacgccgaggacgttgggagaagaagcttcccgccaacgagcctttgccgcccttaatcacaataacccgtctggaccggtccctccgagtcggggaggccacaaggctcatcattcccagcacaacgcccacccccacgcccaccccgcgcaacacggacaacaacacgccgggttcaccgtcgtccaagatccgtcgaccccgggtggtgcggttgggtctagacgagggggtagttctagggggaataggaggcaagagaaggaagagctttggaagtcgatttggggggattcggacgaggatgaggagggtggtgatggggctggtggggaggataagggtggagctgcggataagagcgagagcgagagcaagagcaagagcaggagcaacagcaaggaacagaataccagtgccgccaccgctgccaccgccgccgctgacgatgacgacgagggggaagacgatccgaaccagccaggcagggtggacaagtcggacgagctcgaatctcgggatcggaaagaccccgggttgagcaaaaagaagcttggcgtggaggattccatctgggcgcccaagaatagaggagtaccccgtggtcaacaaccggggaaaaaggtcaaggaggatgtcaagatggaggaattgagcgagaaagtgggccaggtcgagatcgcaggggtcgagacccaaccagccccggccgtgtccaagacgacgccgacgccgacgacgcccgtcgatatcccacccactcccgccccagagccgatcaaacccaagacgctcgaacccatctcgaggtttcgacagacggacccgaacgagtcttcagggatcaattgggcggatgatgacgaggaagacgaggtcggtgggttcatggtcgacgtcatggcccaatgggggatggctacgggtgcggaaaaggacggcgacgacggcgacgatgacaaggtcgaggtcgaggtcgaggctgccggcgccgagcaagacgcgcgggatagcggggtcgaggatgatcaaaaggacaaggtcgggcaacacgatttggccacggtgcaagaggaaaaaccacaagtccaggacgacgcacgaccgaaagctgccaaggtgccattgtcggatcgaatcgattgggatcgacaggccgcacccgcggaccctcctcgaggcccgactgcggcagggtcgtcctcttcctggaggtccgactcggcacagcagaacccggctcaccatcaaaacgccttccacggcgctcagcggggtcgaggtaggggtggtcattcgaggcaacagtcgtatgaccattcacaccagaacgaccggcaagcgagaggtggcggtagacggccgacggaattgctttccctgccagcctcgcccgtcacaccggcgtcgacggcgatcgtcactccgaccccatcgacgacgagcgcggacgaacaccccgtcaggtcaaagagggaggacgccgtctcgtcgtcggcaaagtcgaccccaagcgagggtccagacgcacggagagcgaggaccgagaggcccaagttggccctccaggattcgacgtttaaacgcatgacacgggggctgctcggaggtgcaggtggacagggaccggcgaggaacaacgagggcaacagcaggtttggcgccaaaaagcacgaaggacgacagggagggcccgcagcggcatcacccgtcatccctctcgcgcccgtccagcccgcgatcgccacgcccacagggatcccagacgatttcggtggcaacgacgatggctggaacgaggtcaaacccaaaggtcgtagtcagagaggtcgaaagaggaacacataaggagggcagagcgaccgggtcgcagaagaggatagaatcttctcatttcgttgggtctcaccgtccccgttcgatcgcgactcgacgcaaggatagtagtgtttgtagtgtttcatcccgtcttgttgcataccgcctaggaggtcttgtccttgtatttttgcagaatggtagtagaaaataccgagatatcataatgccacgagatacgaccaagtaggacgacatcgccttccaggtcagggcccgcacggtacaactttccgatagatcatgaagagaaccgatggcgaggtcgccgatcttagctgtttcgaaactttttttttggcactgccttgttcttgtcaaggccagccggtcatgcgccgagagagtcgggctcacgcagatcgaagacgccgacccgcaagaatacaccctgcgaatctccctttacctcttccgatgcggaggggcctcggtgcccagtgagaagctcgaatcaggcctggcgcagcgtctcatgggtcatcaggcaggcggccgggcaaatcacaacatctatgatcaaaagacgtcatatttcgatctagctttcgagatgctagaaaaggaagaggaaaagtccagcagcaatcttccaaacgtcgtcatgccatacctaagggtgtcttccaatcgacatcttggaccttgtcaaggatccctctttgtggttccggcagttctggcaggaagagatgaaaacctccatcacctggcccgtagcgcgtcagagagaggacagactggaagcattgtgcataggcctcacaatgtttcacaatcggtgagtcccttctgtaatcggcttgattgtcgccagcgagatctagttcattcccgacaagatgtctcaacccgacacgtttgcaagatatggtctccagcataccccgtgtcaatacttgagctggtttgtctcatcgccccccaaccattcatgtcgatatagttataggtatactaccggtctcaatatgttcacaatattgctgatcttgaaatctcaaattatcttggagagcagagggaggtggctcacgagttctcaggtcttgctgggcttgggctcaaaacagcgcaaggtcgtttccaagtatacggggcagactcggtcgcgacaacagcggccaccacggtagtatgcaaccatgatttcagacagagccgcttcctccctgtgtgctctggactggacatgatcatttgacttatatcgcctctcaatcagcgacaaatcaaaggtggagaatcttgcaaagaaccatttccccctctgtatcacatggcggcggccgcacgcgcctctcgtctaaagcgcggagccgaccggattgatcattcatcaacatctcggcaagcagctgatgtagaataaatatcatccaaggtgaaagagacagtcgatcctctgaactataagctgtaattacctgtacttcgggcgggacacagaaactagaacctcaaactttaccatgtctgccatcttttcaggccctgctcgagcattggtagtcggcgggacatcgggtatcggtcagttggaacggcttccaccaggtgtattcccaacaatcagctcttaaccccggccctctgaccgtgtcgcaggctctgccatcgccagcaatctcgctcgatcgcttcctcccatgtccaagttgaccgtcgccgggcgtaacaagtcgtcggtagatgagctgatctcgcaatatccggacacggactttcaaccgatcaacgcctttctcatgaaggatgtcaagcggttctgcgccgaatacacctcgcacgtccgatcctcgtcgtccgacctcaaggagattgatatcctggtcctcacccaggggatattgagtctccagggccggacaccgacggcccctgagaacattgaccaaaagatggcccttcactactactcgcggatgctgatcgtccgggaactcgaaccgatcctctcgcccagggctttggtattgtccgtactggacggtcgaggttcaaatgtccacgacaatgtcatcaaatggtccgacctcgacctcgctcaacctggcagctatggaatccagggggccgcccggcattgtttgggcatgaccgacggtctcttgcaagccttcgccgaacgtcacggtgccgatgccaggacctttatccacgcctacccgggtttcgtctcgaccccactcttgaccaagaacatgccgttctacgcgaggatcccgatgaagctgctcggggccgccatctcggtctctccagacaagtgcgccgagtacttgttgcaaggatcggccgatgtgcatgccaagggcaggggtagctacaacattgacaaccagggcagagaggtccaaaagacacccgcgaccaaggagcagatggacaagctgtgggagcacacgtgggccctgatagatggccaataagcgtttgggcgtcggaccgccacgtctggacatcgtctctggttgtaaaaaaaacttgtatctaggtatataacagtccttgccatcttgtacacgacgatcgtttcccagcctgagtgatgcccggaatagcaagcagacagagcgtccgatccattgcccccatctacccagccatatgatcccaaaacaccgcatgtccaaccctcatctatctcacgcgtagacgtcgcttccgaaagcccggttcccttcccgggataggctgatgatgtgatccccgataagccgctcggcgaatccgatctcgcagtacacgctatgaaagagagagcaaagagtgagcgggactcctcctgggttgggcgacagtccagatcacgacttacaaatagtctaaatcgggcagggcggcagcaaggcaaattcagtcggacggtctttgcggcaaacgtcgattgcgactactcacaaatccatttccgcttgaacacctcgacgtcggccggagacatttccgggtgttcatcccgcagagcgggcctgatgtcgcgatcaaagtttttcaaaaacctcaacctccattcccgcaatgtccgagcgtagtgtggctggcgacgtgaacatggcgcattccgaactgggtcagcgagatgggcgagccaagcgatgaccagcgcatagtactcacaccaatgttgaccatcgagtcgacagtgagtctgttttgactacccttgctgatcatctcggtggtaaacgctacgctaggaaggaatccaccggggaagactgtcggaacaagacgaacgccatcagtctccctcccgcttccgatgtatatctacatggtctgttgtggtaaacgcactgtagtcgagtcaaagggccgacaatattagacaaattctccacacttgatatggcatccgagacttacctccacttttgaatgaaatccgcattgttcgagtctggtgaaacaggaaagaccgaccaccagatcagtaacccgcccccgaaccgccccggccttttcgaactacgaagactaacaattttcgaacctcgactctgggatggtgatgacctggaagacggcgactcccgtctcgttcaacacctcgtcgatcatcttgaagtacggttcgatgtattctttgccaacggcttcgagcatctcgaccgagaccagtcggtcgaacgagtgtttccacgattctgggatactgtgcgagggcatttgacgttcagccgcggacacgcacgcggacactctatgcgaggatcgacgtacctcctgaaatccatcaaatgcaccttgatggaatcctgcaacccggccttccggatcctctcctctgcgagtactttttgctgtgtactcaacgtcaacgtgtccaccgtgcaccccgtcaactttacggcttccatggccatgctcccccagccggatccgatctcgagcacccgatgtccacgcttgatcttggctttccggataatatggtgcaacttggcgtactgagccgtctcgagcgcatcggtcgtcgagtgggacgcttccgaggggtacgagtcctccaggtagatcgggttgaattcgttggattcgagggacgaggcgaggtcaccgtcgagcgtggggaagatggcgcacgagtaggtcatctagcggcgcgagcacatcgattcgggtcagcgttccccttccttgcgcctttgctcgccgggcgaacgcgatgtcgactcacatcggcactcaggaagctggcaaacatccgattactgatatcgtaatgcgccttgatattgcccacactgttcctcacgctgttgacgacgctcgaattggtggtgtagttcccgatcgtcgaaaagatggtcgcgggcagagagttcagcccgcccgtgatccccctggacgaggaggccgcgttggggtgcgcgaggtggtacgcgtacgaagaggtcgatgccgggtggtctgaccggatggcgatctggcatcgtaaaccaggtgcgagatgttacattaacacctcctaggtcaaggatatcccccagtccacccggtagcaaaagactcaccttgaaaagctccaataattcttccccctctcgctcgcccttgagaccatcgaccaccgcttgcccgtaatacccttcgtccaacctctgtcccctcgactcgccctctccctcgtccaactgcatcttcaactgagtctccacatccaccccggcgccctcgatatcgttgcccgtatagtagacgtcgcattccccggccatgtaggcttcagcgaaaccgagatcaccagagagcaacagccggaggaaaaacgtcgaatccttgacccggatggtcactccgatcgggtccgactcttcctgttgttcctcgatccgggagacgtccaacctggaccctgatcctgactcggggacggacccggcgaggtgagaaaacgtcttgccacgggggctagacgcgtcgatcgatgtcggcggggtggaaaccccagagaccgtgcccctcgtcgtcgtaccctctcccccgcggtagacggacgagcaagatcctgccgaggctgggtagtcgaatttccctcctcctacgatcgtcgaggtcgaggtcgaggtcgggccgtcgaggttcgtcctcgaggtccctcgtgtgcgcggggagggaccaaacgtgtaggtcttgttcgaggggaggacgagcgtcaattgtccgtactggatctgtttctgcatgaccctgcatatagagagagagaccgggcgaagacgacgacgacgacgacgtcagctcgacgtgacacatgatttgacgatctcgacaccgaaccatccaccgagggtcgactcacctgatcaaccccttttccagcaactttcctacgacggggttcccagcgacgttgccgcctacgaggacgatggtatctctggcgaggttgaccgcgccattgcccaccccctgagccaggtggagggccgaggagaagggcgaggtgagggtgctgaggactgtcatctgtcgaaccggctcggcgaggttcgggaggggtaggtaagtaaaaggcgaggtctgacgttgaagtcgagctcgtgggttatgactgcggggagcagagtaaagacgtgtttcgtgatcggtaaaccgtcgctttgcaaacggacagtcagtatcgacttactatacgtagaagagaaggacgactcggttcttcttcaattgtgcagtcaatacttgactctgactagctactaaagagagagcgttgacggaagatgccgggtcgatcgaggtatatgacgtgagacgtcgattcgtagtcgttcctttgttgagtgttgcttctcgaggtcgatgagacgcagggaaggcaaagtgacgagtcgcgagtcggtcgtcttgatacggaggatgtaaagtcgtcctggtcgttgtccgagtcggtggtcaatgaggacgatgcccgtgtgtgtgtgcaagtctgagcccgtgttggggttgggccatgtcatgctcttcgttcgttctgtctcgttgctcgttggccgtgtcgatcgcccgtatcacaacgtcgatcgatcgggaaagaggggaacaggcaggggcagggcagggagagggagagggcggaatcaaatgacaacatacccacccacccacacactgttgcgcgcaaccggcatctccgccgcgcgtcccggcgaattccccgagaaatgacgttggcacggggggaatcagtagtagtacacgtttcatcaataatcgatcaaccgatcagggacagacagacacgcctcctcctcttagacaccatgcgacacgctcaaaccggcagactaccccagacgatcctcgaccctcccatctccctttccaccactgaacctcgcaagaaaccgtccggcctcgatccataggccatgatgtgtaacaacaggtaccgtgccaacgagtcttgcgaaggaggcgcgtattccatggccactacgagcgcatagtggtggagtacggcagaccgagagtaaacgatcagctttgaccgtttcgagcgggatctggggcgagaacgatgatgcttacacaaccaaccgaggatcatcccgggtaacatgaacagcaacaccttgatccaggaccgattctttctcttgactttctcgccatcctcgacctgctcttgctcgtggcgctcgacggaatccacctcttccttttcctcctcgctcacgacccgtccctcagcctcgtcgctcctctctatcgacgaaccgccgtgcacgcacggatcagtaaccctctcgtccgcaggccgctcgtcccgacccctctcccccctccctaaaaataacagggcaaagactcaccctcattcaaccgtctaatgacctcttcctgtcgaaccttgagcgcttcctccaggacctcgcacctgatccccacctcgctacaaagccctgcatacatgtccgcccattcggccgtcttggtcaacgacatgaccggggacgatacgggcaccggcgagtccttcgatcccgatcccgatgataaccccgatcccgagggtcctcccgtatcgctagggagcagcaatttcggatgagctcgttcgagcgcgttcctcgcgatctcgggctctggtcggggcgtgtacgggggcaaggcgggtacgggcggttcgggttccttctccgtctgaatgcccatgctcatagaggacgagtgcggggcgggagaggtggatcggtccgtataggtgatggtccgctcgagatcatgcgtgtcccgttcggcgagcgggtcggatggagctccttgttggctggtcattcggggtcgctgcgaaggcgtcgagggatcggaatcagtcgacaagtcgagcggagagacaacggtgaacccggggcaaaactcacgacaacacgtctgaccgtcgttgtatggtaaatcgttgtcacgccgtcgtcgccttcgacgtactcctccctgcgtgggtcgtgcgcttcgttctcctcttcctcttcatccagatcgtcaccaagctcggtcgccaggctcctcttgactctcccgctcgttgtaccagtgacacccgccatcccagcctcgcccgtcgacaacgtgctcgtctcggttccccctctcgcgtgcgaatggctcaatctcaacctcagatcgcccacctcctgattcagatttccgatcgtctcttgcagctcgtcttgttgctgtagttgctgtttcagctcgcggttgtgtctacgtaaatcgtccagctgagaggtgctctgatcgtggcgctgatgcaagtcttgtagatccctcgagagctatcagggagatcggcccagagaggcacgaagtgtatgagccatggcatcgaattttgtcaattggaccagtcactcactgaatccttgtcatccttgagctcttgcaaatcgttcatcaggtttgaaatctcatcctccttgtctcggatcgctcgggtcaagtcctgcacctcgtctatagcgctagcttggtgagcatcgctagtatcatcgcacgtaagtccctgtcgcgctcacctttcagcttgttattggtcgacgtcgcgcttgacaatgcagacttgaggtctttcaattggtcttgcgtggtcgacaatttatgttccagctggaggcgagcatgttagctcgaaaaaacaatttctggatcggtcagtcgcgagtctaccaacacacctcgtttagcgccgtttgattctcgcggtctttttgcttgatctccctttccaacctctttttctcggtcgtctcgtctttcaaattgttttccaaatcaagcatccttccttgcatcgtttcgttgtcgttactgcagaatcaagctggtccattagctggggtcctttcgcagcatatcgacccatcacccacccttgcgcagtcaacttgtcctctaataccctattcttgttgttcaattcctgattctcgccttgaagctgatcgacttttgccctgataaccatcgagctcgtcgagtcggtctgaagcacggccacaccgggccctcagccgttaaccccgaaacccatcgaacgcatcgatacacatgtcgctcaccgagatcctcttcatcctctcgccgctgattttcctcctccttcctcctacaccctcaccgtaatcgatcccgtaagtgtcatacacgtcgtccatgctggccatatccgcgctcaggtccatggtggtatccacgatacttcccctgcccatccttgaaatgtccgcctcggcctggacgatgccctttgcgtaatcatccaccgtctcggtcatgtccccgacaaacgactggtcgtctatcatggagacgtcgggcagtttcatgtcgtgcagatcgggtgaaccgggcgtggcggtcctgctatccgagctagagcgcgggaagggcaaagtttgtttacgttgactagaggtctgacgaggaggtcgaggtcggttcaaacccggttgcgagcggttggacgtggattgcttctgcatgacggaaattgacgtcagccgattggaaagagttgatgccatgcacatacggactcacctcgctcttgtcaaacgatgcatccgcgtcgacgatcgtctcctgactctccctcctcgatctcgctacggaaggaggtctcgagatccctccgatcccagcgctatacccgacccccatcccgaacgcacccggtggtacctgtccgatcctgctcgaccctgcttccgccgacccagacctggctgttccggccttggctttacttggactcccaaagacgaacgaggaaggtggatgagcggatcccgaaccggacgcgacggtttgtacggcaggtctagaggggtccgacctgcgactcgctcgagggatgcccgaggcgaacgtcgagttgggtggggagaggacacgctcagtcgggaaagacacgccttgagctgtcctggctcgctgcctcgccgattctggcgtcgtcgggattttggtattgacggacaacctcgaagcggatggtctttgaagtcgcgaagcaggtcgcgaagatgtctgttcgtcctctggctgtatggccatgctgagatcgcccccctcgggttccttttcgttgaccaacaagctctcctcgacgtccagctcgctcccgtccgagctcgagctatcgtgcctgcctctcaccctgtactcgttgcttgtccgtcttctctcttgaaggtcctggaacgaggaaggcgggacgctgttcccttcctgcttatctgtcggctggtcggccgtttcaccaaagacggccttgatactgtcatccgacttgtcctgcgtgctctcggataacatcctgtcggcttccgcttgcaacatcttgatgatattgatggcattacccttaggcgtctgatcctctgcacagctatcgaaaaaggcctgagtgcgttccctctcgctcgcattgaaaaagagctcggatcctcgtgctcgctcaaaggattcaatgactgtcgaaggggcgaggtgaagaggttagtttcggaggggtacgagctagtaaaggtggttcagactcgccgttcatcaaatcaccaaacttgatggtgggttccgatagcagagcgtccaagagctcagtatcagaaccgtcgtatctggtctggttcccaggttggctctaagcgcacgaagagattcgttagctgatttcgttcgcctctgtcgaccggaaggtacttgccattgttcttgacgagactagatggctggcgtcgatcagaagaagccgagttgaacctggactggcaatcaatgccaggtctgatttgcagcagatcgatgctatctggaatgatatcttatttgacaactatgagatgaccatattctcgcgagattgagatgtagacagggctgagaagaagcaagaccgatgcgagctgatgagcttcttgatgattcaaagatctcgaggtgttccgcaggaattgtcaacaaacgatcaaccctcggcctagcctgatcatttcactcgacgcggtcatcgccgtccgcgcgcgttgaaagcgttgatgagcaggaggtaggccataaaaccgccgtgagcgttggcgtgagcacatgtcgaacgtgaccaagagcgtccatgagcactagcatgagcgcctgctcacggctctgtgagcagacaaaaaagccgtggcaaatatcgattcttacgaaaatcccttgtttgaacctcaaaagccaattaaacataaaagggtacatacctgaactgattcccagcaaaagcacaggaagaacgttgaaatctgatgctctagagacgtttctgtcttcacttttgaagacctgtaggtcgcgctcgctcacggcgtcacgcgacagcaattaccctcttgtgcagttcgcgcgctcgaattacaagtcggcaagatcacgattcatgatccaccgggtggcccttagagcagctataccagattctagacattgccgtgctcagaatttgggtcgttaacggcttcttgcgcgtgtatggatgttgatggttgccacggaaggcaagataggcgcgcgatgacatggatgcatggtcccgcaagggtcgaaatagattgcgatgatgccgtataccattcacatacatctccgcctcgaaaacacatctaatgctctattcaatccgctccgctaccccaggactccatcaagtatctggcaaatctctccgagatggcctcttccgtccacgttccctctctcgctcccgtacccccactgaccagtgcccgtttctggatcccctcaaactgccgcttcaggcgttggagctcgctaggagagatcgctcgtggtgggaggtgaaccaggagcttgttcaccgagggtttggatcttgagctcgagctcgagcttgaagtcgcactcgaggtaatcagagggaatggaggtgagggggaagggttgagggcaaggtgggtctgcagggcggagaggaccgaggatgtcgtcttggtcaagacttgcagagcatcgggtggaggtttcgtcgcctgcgttcaacgacgatcgtctttatcagtattgacatggcatgtcgatatatagccgaccatcactagactcacctgggcgactgcggccgtcggacccttcttcgctcccgtcgtcaaaacgacccatagatcgtccagagtcgaattccgtcgaatttcgcttgtcgctttctcctcggcatcgtccttggagcgttcgttgagaatgtcatcgtcccacgctatactgtagagcggcgagtcccaccggaccatcgaggaaggttcttcgaatcgcataaacagattatcgagactgcaccagtcattccgatcagcaagttcgggacctcagtgactcgagacggcgatcgaaatcacgagtcgactcacgtctcaggcttgtaccgatccgcttccaccttggacgcctcgaacctcctacacacctcttccggcgcagcgacgtaacacgtagcttgccggaccctcgcctccctcgccgcacaccatagttgataccggaatcccttgatataatttagcccgtcgaggataactagacgtgatggtgacagcagacgggtgacctgggtgaagacgtgcgctcgagcgggtttctctgagagagagtctaagctgggtcgaacgagacagcatgatcagcgagatggcgccttggaacataccctcctatgattcgatccaatccgtccactcactatcgtacggcttccggccgtcataatcgatatcgttcacgatgaccacctctcgaattccgtccaccactccattgttctctcgtatccgtcgctcaaaatccgtcttgatctgttccgaccgtgtcgatttgccagaagaaggatagcccgagatgacaataagagccatttctaaaggagtcttgtatgtgtcgctgcgaatctgcggatgagcttccgcaatcgaggtcgttgaaacgggaattcggtgtagaacatatgctcgtgtactcgattatgcagatcggtctgagtctgggctaatctggggaacgccgatattcgtcagtggacattatatatagctacatgtccgtttgcttcgccgctcccgcacggctcctatcctatactctatgtttggttcgatacgactcttcctgcttgctcatgcctctaggagcgcaatctcatggccttttacaggtgcatcatcgttcatggcattgctcgccctagcgtatatgggctgcgagagacacgctggtggggtccgaatcgtcgtatagtataacaataggacattggtcgtcagaacggcatgtttggccgttgaggatacatcgtggtgaaggaagaagttcgtccaagggaaggtcgtagccaagcgaggagggtcatgccaaatagttgctgagaagaggaagacgtcgtcagcgggtctaaatgacgacgcgagaccgcgtgccgtcgtgcacgtactaagtatcgttctgtccgtctgctcgctcgaggtagtcctggtctaccagatgctcgatcgtctttttgatctgtgagactactggcgggaagtttttggatacgtgctgggaaacctcgttgatcaagtgctggtgcttcatggtctgcaagaagggaggagttgagcattgtcacgcgtctgcgcttcggacggcaggtacggacctttcgtgacttcatgattctgcgattcagatagaggatagtgcaggttagaaaaacgctcatatgagccagatgacacgttccgtacataccgaacgatagtggcctggtaaatgtacttcctgtcgtcctcggcagcctttgtgacttcatccgattccttcttctgttcagatctcatcggtacgttgatgttcaaacggatctagaatggtgcaagcggattgagggactggacgtcgcatgaccctcgaactcaaaagcggcttaccttctttgacttgaagttataattaatgtcgtacgtatctccgtcgaccaacaacacctttgacttgacgagcaacatcatgaccatcttgagcatgtccggggccatcttggtcctggcctcgatctcggcaaaggtcaagctctcctcctcgttgaacaacatcaagacggccatctggtaagtgctcgtcatgagcgtgatcttgggcttcgtgtaggtcagttgaatctcgttcttcgaatagttccacatccaagtgagttgacgaccgctgcagaagcattatcatgttagttggtcgtcactttgatgtgtgaggggaacgcccttgcctgtgactgttattgtagtagcccttgaagcggtcgagcatgggttgaagttcacgaggtgcctggaactcgatggctttgctaggcagaggccagttgacggagccgccgacgacgatagtaaagtcgactggcgatagaaagcatcgttagttcttgccttgcctctttcgatgatccacagtccgcgtccgacatacctttatcttcgaccccagagtgggccatcttgtcgttgaacttttcggtcaaatccttgctcaagctcacatctagcgagcaagatcggaactcagcagctgcacttgctaggctcgttcatgcgccgacgtacccgtgagcatcttttgcagcttggtggtgtattcgaatccgcaaatatcctttagcttggagatcatgcttccttcggcctcttccgataccgacatgccccggagcagtcgttccgctagccgtcgcgagtagaacttttggaaaatgtctttgtggttgaggtatatgaacagcgtcatctacgcgtcaaattgattgtcaacgtcagtcatcccgctttgcaacgtatgggttggatcgcctgcatcgacgtaccgaatcgttgagtgcttcttccatagactcgtcccccgactctttgttgctcttcttcaactgctggtcgacgtaaagagcgatcaactcgggcgatttgttgttgtccgaagtcgccggattcttgttgataaactctgagcaggcctggtgtccggacgaaagaccaatcagtaccccagacttgaccctagagcgtacatagagacacaccttgtccagagcagcttggaacccggtatctccctcgaacggcttctccacgaccgacaggttcttcttgtagacttcgagcagtgcggtgacgtagctctttggatcctatgagaccgggtcaatgaacacgatcagcaacgggttctcaaactctgctgcctcttctagactgaccatcgtctcctgtttgccatccgctccgatcgacccttgagtggcacgggcgacagcatccaacccgtttttcgtgacatgggccttgaaagtctctcttagggggtccaacccgtttactcggaacaaaagcttccacatcctcgcgaggtctgtacacgtcagcgccgggtctgatcagcttgatcccgatgactgctcgtcgtcgaaacagccttaccttcctgtcgatcagcatctagtagggcaccaaactcttcctgcatccgcgcctgatggtccgtgatcaaagctgcctccgccctcatcaacagctagtcgaaggaagaatcggtacgagaattcgacaatatcagtccatacgatcttctcgccgtaaagcgcttgagggacgcctcgccaacgactcaccggctgcttggtctgcgaatgcatatacaagttgaccctattctcctcctcctctaaccgcttctcggccagtcgaaggtaatcgctgatattgttctctgccaagaatccctcggattcggccttgtagtagttttccgtcgccgtcaggaagggtttttggaagtgttcccgatagacttcaatgtgcgtcttgttctccttgtttccgtgttgttgttcatcctcgagacccagggcgactgtcgggaaagatgaacgggaatcagcctcgggtccactttttggggggggcaatgcgccgacactcacccatgctatcgacgatcgacttgatcatcccaccgtcgacctgttctccgttccgatgactctcgatctgcttcaagagtgccgtgatgagtcgattgttattatccttgaccatgccgaggaaaaagtgctctttccactggacgagtgatagctgttttttccagaggaaaactcgatgcgcatcagctacctgttcactggaagactcgaatcgacctcctccctctattgggaagacgctcgactgaccgtatagacttggtaaatcccctttctcccttcgtccttctcccgcttgacccaatgtcggttcaggtacgcgaacagccggttcacgtagttagctcccagcgtgtagcgtttccactctttggtgtagaattgcaagagagcgagatcggacaggtcttctgattcctacgaggaggcggggcggggtgaaccgagaatgtcagcggggacgtctccgcaggtggagcacacgcgtaggccgatcattcagtctcggactcaccgttcgaagccggaccagatgagtcttcaagtactcgctcaacttgttgtacagatcgcttcccatcaagtgcgctccggctgttaacagacgatctcgtcagcatgccaccccgcgttgtcttgtagtgaacgggaatccctcgaccaggagaaacttcgcactggggggggactcacctttgaccgtcccgctactcccgatcggggtggatccgtacccagggatctcgtgcgacttgttactgctgatacagtagttgtaacatgcggtgtagagcaacatgtagtacgagtatgacattccgtgttcgagcctggaaacgacgacgaagacgaagacgagagcaaggaggatgagaaggaaaagtgtggtcgagtcagtgttatgcagagtaagacttatgggacaagagcttacctgaccatgatccggtcgacgccggtctttagaaagttccatgagacctagaaacaaggacgaggacgaggccgaaatcgaatcagcattcagccgagcgatcgagcggtaaatccaaagagtactgctgtgaactcacttccaggctcgcattactgtccaggatgcattgaaggcaagtccgcatggacgatgaggtttgatattccgagggacggggtatgcagggatgaggtcagcttctgctcctcgatgccttgcccggcgctcgacctgggaaggatcgttcgcttgtctactcacgtcggaggacccttggtaggttcttggaggtccgccatggtctgactctctacccttgccagatcgagtggggaacgggagtcgaagggctgattcgatccggttatggcgaggtctgaaagaagcttgtgtaaatggcgaaatgtcccgtgtatcgatgaatgggcaggatttctcgttatacacggatcaagtacggttataggtaatttgtgacagtagtattgatgttgattgtggattgagatggcgaggaatctagccagggtagatcaatgaattcaaggtgttcctacttcgaatccctgtgaacgctcgcggttccgcctcgctcgctcgctcgctcgctagtaagcgaacaaagtgaagaccagggttgattacgtaatcatacattgtctagggggaaaaggtcgaaaatcaggcagtagacatcagttagagcaggtactttggaacaccttttgagatttctcgcacagcacacgatctcaatacttcccaccttgtcatatcgttacgagattggatcaaaagaggcatcatgtcaatgtcgctcaaaagcttgcggcccacctcgtcgtcattgcgtcgtaacggacttcgatcgttagcgactgccgctcgacctgccctactaccagacctcgaggacgagccaggtcttcccgagctccagattccgtcccctggagtctaccctcggaccggatcgaacgtcctggagatcaagagcaacctctcgtatcacacgttggcgcacacgctggcgatcgtccgagccgtcgagtcgaaatgcggccgagtcgtcgacatctctcaacccagggtgagtcgggctatggtggtgtgacgacactgcctcgagtgtcgagctgattcgtcaatgatcgaacgtcacagttctcggataaccagcgggccaggtcgaccttccaggtgaccgtcctcaaccctgtgctctttgacaaacctctcatcctcgagatccctcaacccgacctcacttcatccccacggatcacgcactacggtccttccctccaatccgtcatctcggcgctctcctcgtcgtcttcatcagcttccgtctcttccttttcacgcaagaagaagaacatctcggtcgaagacgtcgtctcctccacgtttaccgcttcgatcgctttgggtcttcccttgaaatcgcggatgcaacccaggtaccccgttaagaacaagaggtcgacggcgaggcacgacaagaaccaagtcgggcggtggagggacgaagacgaggcgatcaggaaggtgcttcggtctggattcaaggggttttacggcgggttcgaggaactgagcaaggtcgtccagtcgactcgtgaggccgagccagaggtcggggaagagcaggtcgatcccgaggaggcggatgagcaggccgaggagtcggtcgaagcggatgtctcggagcgggacttcttgctagacaaggcgctccagggcagtatccggataccagtggaggaggaggagacgacagcgagcgccggatctaacggttctacaccactcgcatccacctcgacggcccctttggcgtccactaccatccccaccaccacgacctcgacactcccatcctcgcccgctcaacccgcccgtccacaaccacccaaggagagcaaacaagtccgactcgcccgtctcatccgggaacgtcaaaacgacccctctgcacccccgctcaacctcgaatcccggaccgcccgcgcgttgatccggggtcgggaagacgcctaccagagtttcagggagcagaaagaggggaaatcgagggccaagagtctgaggaacaaggaggcggcacagaggagacggagggaggaagaagccaagggggctttggattccatcaagaattggtttggattctaataaacgagacgaaacgagaaacgtcgagacgatgagtcgtgtttgttgatcccggcgatctaggtcggcgagtatgaatattgcatggtcataccaccgggttgcgatcaccgctgtacgacaaatgttgatcggtcgatataggagcagtgatggcctcagtgtccatcagattcgactcgggaccgctgcacttggagatgaatccgatgaccaggatctcggcggttcactccaatggacgaggaaccggaatttcgtgatcgtgtctcgccaatcggattgccttcatccacagtgtgtgaagggaacactgcgagactaaactccggtcggtcggatcatgtggggtatcggatttacaacttgatcacagaccaatcagcacacagcagacagagtgtcaaatatacttcgagagactacgtcgatgtgacaattggcgctttttgcccttcgcctggagggtcttgtgggcgagcattatcgccaccttgaccccaaccatcctctccgatatgtcccggatcgaattcgatctcctcgctcatcgggctcattggcgtcatactctgcgtgagaccctctgcagcttcaatgacctcgtacagggcgttggccctctctggcggaggaatctgtccggtcaagatggccgatgcagggatggcggctccgtagaacgccttgttcgcctcgcgccgttcgatcagagcggtaccctcgattgataccccagcaaacagtcctgtggaaacggtctctggtcagcacttgaacttcgcaaagatcatccgtgtcacagaaacttgcctttagatctcgtgtagctgaacataggcgacggatgctgcaaagcggcgttcacctgggccccggtcccgatcggtccagcgctgatagacagtccccctgtatgtaaagagccgtatgcgtcaactctagcctaccttcgcgaatgcactacgtttagattttcacctccgatggtcaagtttccaccttgactgaacgctttcaccgcggcgtcgtcgttcagcaccacgacgacctctgtcacgtctaattagatgagaaacggatgagctgatgtgactactttcgcgttggcggaccatcccacctgctcccgcctggaaaccccaaccaactcctccggtagctatacagctaggcccactccaacttccatcagggagtcttgccacaatcagccctgatccagctttgcctgagaacccaaatccaactgtgaagcggatgctgctgctgtcagcaccgacttggctaaagatcgactttgagacccaccctttaggacagtaaacactgcgaatccttttgccctcttgacgacctcgttcggaatgacgttcaactttctccgtccgacctcggtatcaggtgaatgcgcatgcatgaacccgctcaagatcttggcgaccttgtcgacctcggcttccagtgaaaaggtcaattgccgatcgagcttcatcatgccgcccgacaacgatggcatgggtccaccgcctcttgcggatgttgcgctggggtcagacggacctgtgcgagcctgaatctgttgattgatctgagctcctgccatcgtcgccgttgacttggctcgattgaggaacgagccgaacttttccttagcagacatgttgccggacaatatgatgcggtgcaattagtaaaggacagatggtcagatcttcacttgaccgtttgacaagtgtgaaggccatttgatggaatgcctcagggtggaatgacaaagtccatcgccgtcgatatggagcacagctatcgacccgcgagtcgtcatcgacaatatgagagcatacaaccggaatcaaacttgcccccgatcacctacgcaacacccagggacaatggccggacgtcgccgttgacaatcagttgtcgctgagtcggaggacatgcatagatgatattagacgatcagattacattaatgtcgttgaacgtggaagcgtcttggtggctacatggtaaataagggtggagcgttacggcgggggctacataagacgaaaagggaagacggaaggacagatcagggaggaatcaggggacgtagattcccctgtcgtggaagatagtctcgccatacttgtcctccgcaccctccgagagaaggatgtcacgaatctgacagttgaaagcatcagcggcattccaaggcagatcaccagttgagatatgagtactcacttcggtgggcggttcgagaccccatccttcagctcttttccacctgtccaacctgctgatccctacgcaaggtccccattcggaactgagatcaaacactctgaggatatgatcgatccggttgtggctcttgggggtgcaatgaactgagcgaaaacggtaagggtcagcgagctgcgccccgtgtagacgtaagcggtctgtccagactcgcggactcactaggctcaacgtcctctcctcccatcttctcctgcgtctccttgtaaatcttgttccatctcttgtccttgacgttcaacttctccttcggctttgacttgacagcttcatctttcggctccccatcactctcgcttccttcagtctcgtctgcccctgtaccctctccgacaaggttggcgatcatcgctttcgtcggctttcctttcccgagcggagcgaagtcgacagggacagtcgagacgaatccgaactcgcccctctggaccgcttgctcgcctgtgacatccggcttcgtatcctcctcgtcctcgaaggggttcacctcggaagagtccgtacgtttcggtcgagtgaagaggggtgcataggtcttggcagcccgcggaggtgaagacaaagtaagatcgatcggctggggcggtttagagatttcgaggacattctgggtcttcttctttgccggtgatttatggatcgactttttggcagagaagcccaaagtgggctgaacgttggccgctgttcgggtcgactcgctgcggcgaacggtaggcattttgatggctgatcgtgcagttgggggttcgcgtgtaccgttgcgtttcgatgtttatgctccgataggcttggatgatagagggagatgttttagaggccagaggaggaattaatggatcatgaaaggatagctagatgggatcctatcggtctgaacctgaatccgacggatcgttgatcgaggtcatcaattggatcaattgatcaatttccggttgtcactcgttcgctagatcgctagccagattcggacgaagtcgacgaaatggcgtatttcagctaaatgacgtgttcccacgcgttcgatctgacgcgtcagccgcgcttgaagcggacatggccacgttttgctgaagtcaacaggtgtgaaagacggacatctcatactagagcaagtaacatacatcgagcagctatatttcccaaggttacaaagagcacgtcatggactagatatgcctatagagcaactttactttcctatacgggccatgacctgatagcagcatcgaggtaaagtcagcttgaaccgtgaccagagtgaaacctgccatgtgtcgggcttacatggtctgatccagcgagtggtgcaccgactttgtttgctggtaggcggcgagaccttcgacccccaactctcgcccgataccgctcatcttgtaacctccgaacggagcttggacgtgcagcagggcgtagctgttgacccagacggtgccggcctcgagagcgtgcgacactcgcatcgattgcttggcatccgaggtgaagacggcagcagcgagaccataggtcgtgttgttggcgagctccagcgcctcctcctccgtatcgaacttgccgaccgagatcacgggtccgaaaatctggaccgatgcgccttgctcgattagtataggccgtgctggggtcgacggcgatgtgcatgcttacctcttccttgacacacgtcatgtcggggctgacgtcccggatgatagtaggttcaacgtagaatcccttggattggtcccatggctttccaccggtagcgatcttggccccttcctttttggctccttcgatgtaaccaaggaccttgtctcgttgagcagccgagatctgtagggccacgcaagatcagtcagtggtgaagggatgtggcgcgcatcactcgtacttaccagggggccgaacgacgtggcctcgtcggcaggctatgacatgcatgcaaggttcaacgtcttgagtcggacagaggacaggatgccggtgactcacgttaccgatagcgctctgcttggcctttttgacaagagcctcgatcacctggtcgtagattccagactgcacgtagactgcatgaggagtccaggcaaagggagctcagctacgcggccttcagagcccatcgacgggtacatacgtctagatccagcgcagcagtcttgacccgagttgaaccagatcccaagtgctagccattcgacggcgtcgtcgatgtccgccgaatcgaacaccaaggaaggcgactaccgcgtcacgcgcgtgtcagtcgggatccatcagatacgtacctgaaacactcacctttccgcccagctccaaggtgaccttcttgaggttgctctgcgcagcggcgacgctgatcctccgcccagtttgaacggaaccggtgaaggcgaccttgtcgatatccatatggctcgcaatggagctgcccgtcacagctccggtcccgttgaccgtgttgataaccccagcagggaacccagcctccttgatcaacttgcaagcgtaggttgccgagagaggggtgagctcagagggcttcatgacgattgtgcatccagcctgcatcatgaagcgcgacccgcgtcaaacgcgcaaaaacgagaaacaagtcagaaaatggtcgtttcaggttgctttttcgatatttgcgctcacagcgatcgcaggagcaattttccacgcccacattaatagaggataattccacggaatgctgtaaaaacaagccagaaacgagtttagcaaaaagacgtgatcgattccgacaaattttgatcttacatctgcccgcagaccccgatggggtcctgaactgtgtagatgaacttctccttgccgaatgctccgatagtttgacctgcgaagccgctcatcagactctctcccttgatctgtcgctgtacaacctgttcgtgaaccaagagtgaaccagaagctcaccattaggcttgtccgccaacccagcgtaatagcgcaagcatgctacgctatcagccaaatcagcctctcgcgcgatcctgactcctttgcctccgttgatggactcgagctccgcgagcaaggggtcagcttccatcagatcagcgagtttgttcaacactaccaggacaggacgtaaccaatcagcaatctcgaaccagctctcgatctggagcgacgcgacatcccacgtacacctggccctctcagtagcggcaacgttcctgccccaagtcgtcttgaatgcttttcgagcggctgcgacggccttgtcgacatcctccgccgacgccgcgtggaaatccagtaggtgttcgccggtggcagggttgacggtcgagaacgtttccccgttagaagaagggacaaattcgttgttgctgcagagcagagtagccgaagggtcagctaagtgacaggtgatggagcccattcacatgccctcacatgaagagtccagtaggcacttgaacagtcttcccggaagggagggtgagcgatacgggttgggacatggtggtacgtagcaaggtagaggtggtgaaccgtcgtaaaggtctaggtttaaaggcttgcgcaagagacttggagtagatgaatctggtgagcatctgtagagctaggcgggattgagttgtgaacgtccagtttgagcagagtgtcttcagtatataagcaaggtggtcatctgcatggaccccctcggcctcgggcgggctgaccttgtagattaggataaagctgcctatctggataaaccccaccctggtatcgtcagcagcaggcccaggacagactggtcggggaatatccggttgtagtcagtgcgcaccgaccgataggggctaggtgaccagtgccgacatatgctctcacagccgagatacacgtcgcctcgacgccttcccgcctgatatgcttccgatcaaatcggtccggcgaatctagcgacgacctcttgcactcctactagctactagctagtctgtctcgatcctgcttcctcgtcagcttcagtgcggcttcaggtcggtgccccgcatattcaacacatctgttgagcttctgctatgtcaaagtaatatctaggtgcaagatgtctgcgtcgccgcagtcttcggatgtgcatagagaggaaccgccgagaaaacgggtcaggttggcttgtcaggcttgtcaagtgggtatcggtcgggtgtcccgttcggcggattgacccttgctgcaacatagcctgtctgacttttatatttcacacactcttcagaaaaagaggaccaaatgtgatggaggtgagccgggatatttagcataaagactagaccttctagagctgaatcgaccgttacatcaaataaaatctccagctagtcctcgttgcggtgcctgcgagagccaagagtgcgtgaccccgccgactcaaacaatcatggtgtcctatgctgatcgttactctgcgttctgttcagttttgaatgcaattacattcaatccggagtgaaacggtaagtctatgaagcccccgttgaccagcacgttcggccgaaactgacgctcgactcctctacttgcttatgacagaggaccaccgaaaggcttccgcccgaaagccaagtcgggatcgaactctgcctcagcggacgatccaccgtttccgtttccacctacggcctcttcgtccacctcgcacatatctccaaaaacgagcaggagctaccctgagactcgcccacttgccgcagaatctggatcttcgctacagacaagacgggaagatgttcaacccgttgagaaggagaggttcggacctgggaccaagataggccaagggatcacgcacgaaccgaggtcgagaggtgtacctggtcttacaccagctgggcaagagtacttgttgacgatatactggacacacatccacgtgagctaggaacgtcttgagccgttagaaactcggttgctgaacccatcttgaatgacagaacatctggcccctcatctacaaacccctcttcgtgccgtcgcaaacccacccggcattgctctatagcatgctctcgatcgctagcgtgatctcagtgcccatcaattcagcgacaccttcgctacctacaccggatgttctctttcaaacggctctccaccacatacataaactcaccacgatcactccttctcacgcttttcacttggcaggaggtggcaagcgatcacatatattcttgtgccaggcatacgtcttaatgagcctgcgacagacccgaatgggtgacaaagcgagtgcatatctgtacgccagtatggccagtggaatgtgcctggagctaggtctgcataggcgagtgggatggggatctggggcgacggggaagaaagctagtcaagtgagtcgcacccttatttatcagtctgtagttcggaatctcaagcttgatgcggaaatctcaggcggatgaggaacttcgatcacgagtatggtggtgttgctatatccttgacaaggtgctggcagaagagacgggccgaccggtgcttctccatgccaggcggtctactacacccttgcctgcctctgccgaagcggatgaatacgagttgtggccaccgccgtcggcctccgcttttttgccctcgagaaaccgggaacgatacgaggacgggtcaagatcagatcgttacggttcagctaccgtgttcgagcccgcccaaggtcgacttctgagcgcttttcagactacgtgcaagcttggcgtgatcgtagaggagatcctggatcttgatgaagaaggtccgcgatacgagcggtccacagggacaggaaaggacgaggaagaagaattccagaagaaaagcatggaatcggcccttcggaagaaagacgcgttagccaaagcattggaggattggtatgcagatctaccggatcagctgaatgtggatgttacgataccgcgtccggcacccacccacctgattgtcaacctagctgtcagtccccatcagccactcgtgtttctttcggcccgcgatcaagtgttgacgcgccggatccatagtggtatcactctgccgtcatcctgctgcactcacgcttcatctcacttaaaccggaccccaacccgacaactggcgcaagtcagacggggctttacggggagtgccatttgatgtgcgcaaatgctgcagagtcgatcgtcgcgctcgtgcaaattcttgagaggaacaagctgttggaacagataagcagtgatgtcatccacatgcttagtcaagcggcattggtgagcactggcgcgagatacgtgatcaagaacatcgctcattactgctcttccgttgctctttcgatcagtttcatggtacggttttacaataactttcgaagcgatactgcagccatactgatcgagctcccttgtccagcatacaactcttcgctgccagatgtcggaatggcgaatcgcgccaagctgaacttttcacaatgctgtctctggatgcgagacttgagtcggtcctggcctcctgcaagttctcataggatctttttcgagggtcgtaagtgcctgcctgatgttgccctgtgcgccactgtagctcagctcctgcgccgttctcgtagtcatccaaggaggactcgagctatcggagaatacggctggtacccaccagccgcaacttgtccgttctgacccgcccgtcccggtcaaacatcgcaactcgacaggaggcgatgtcactcttgccccagctgcccctacccttgcgccatcggcctctatcgactttctcacgtcgaacgacgtcgctggcccggcgcaaagcagctctgatgccgtcacggctgctgctctagcacaggaaggcattcgtctggccgatcagactgcgcagaattcttggccatcggatctccttcagctcccttcagcttactggaatgatgcattgccgaatgctaccatggatctccaaggtcctgaatacgtcgatttcagccctgcaaccggcttcagcgacatgtcctttggcagcttgcgggggactccagacattggtaggaccaacggcaccttttctggtgacaagacatccggcacatcgcttgctccacttcaaggatttgactttgacaatccaggccaggacacggaagcgagcaatttcttggtgtcgtggatgctgggcgctctgggtcggcaatagcaatatgccgcacatgccatccatcttccgcaatcataatctctcgcttcttgctgtattgaggttgacattagaaaccaagagggctactgttaggaggtagattgataccctgtctaaaatcttgaaatttgcgacaacagagcgataaccttactgcgtttgcgaaccgatcttagataactactacagggatacatactgagcgtggtaggttcacaagcgaatcccaatttactatcggcgcgatctgcctcttgcaaggtgacggagtctcagccttctgaaggagattgccgtcttctggcgctaagataatccatgtagtagaggatgaatcaaccggaagcagaagttgatcccgaacatatatccaaaccccttgatcgcctgaattcaaagtctctgcaggtgccgatgtagcggtcctcgtgtctctgcgtcacaaactcaccaatgtacagtatacagacgtcatgctgagggctcagtcattcaattccttattgtagcgtctcggcacgcccctcgaccgcctcgagtgcccactaacacagtgcaaagcgaacacaacttcataaaaacatgctcgccgagccattcgataccgaggagcagttcgaaggggatgacctatatgctacactatcatcagctcagtaccaggacacggatcttggatcgtcccctattaaaactcgccctccaagctcttccgactccggtattgaggactttgtattcgctacacaagcaagcatagaagaagatatggagtgtcccagctcagcttcgattcgcttggacccccagcctcggtgtaaagccggtgcggcaagtttcaaatcacctttgatatccagcagcaaaaactcaggaaggtctcgacctgggaaatctgccaatgctcaattctcggagccagcaggacatatccggcggactactccgccttcaccttccaggcacccgtacaagcagctcacctcccataaatctcccacgaggaaacggtcaacacccaagcaactcgagataccgatccggaaaccagtccctcaagatgacccgaaacctgtgaagaacacacaacaggcgaaatggaccgctcacttgccgaaggatcttgttattgatctgaccctagacgaagtgatcggtccggtcatggaggcgggtccgagtcgtccaacaccttctgcggaaaagcagtatgataccaagacggaaacggctactccaaatgtaacgactatcgaattatcagtcgagcaacgcaaaattctggacatcgtcatcgcagggtatgtgtttcggacaagtgcaaaaccggatctaaagctgagtctgccaaaccaatttcatagtcagagtctcttctttacaggatcggcaggtatggatgagcatcttgaatctcgacgtctagacgtttcgccgaatcgattaacctcaaaggtaccggcaaaagtgtcctacttagggagatcatcaagcaactgtccaaggtcaacgtagaaaatgcggacggcaatctcgttaagaagcgagtcggtaagtaacctattgggagtttgaagagacgatgatgttgaatttgaccgccatgttgacatctgacgtctgtattagcggtcactgcttccaccggaatcgccggcgtaaacataggaggacagaccctacattcgtggcgagtagcgtcgaatacagcaatggcatcgaggggctcatcttgagtactgcagggctggtgttggactggcgactgacaacgtgcagacttgcgccaaccgagtgatacggcaggacatggaaaagcgaatcggtcgcgtggacgctaccactgaaacggctttggaacgctggaccaagactgatgtcctgatcgtagacgaaagtgagccccttcattaagtcatggaaaggcatagctgaagaagtgattccgacagtgagcatgatcgacggaaggctttgggacaaactggagggaattgcaaggattttgagaaagaacacgctaccttttggtgggatccagctggtcctctgcggggagtaggtcgttgttcaagtaatcatgcttgcagggtcctaactgacgatttgacatagcttctttcagcttccacctgttccggacagacacgataaaaccagcgtcttcgcattcgacgcccaatcttggccccgatgcgtacctcacattatcaagttgactcaggtgtttcgtcaggccaaccaaagtacgtcgtgccgactgtattcggtaaaagccataaatgatgacagtttactaacagtacttacggacctcaggattcgtcgatatgctcacagaggctcgaataggcaagctctcgggcaagaccatcagaggctttgcctgtctgcaacgtccggtcaggtatgaagatggcattgatgcgactgaattggtgagatcattgccggtatctgattttatttcgatattgatctgtacgatgattccagttccccacgaaacgccagtctgacaacgcgaatcagtcgaagctaagtcggctagctggtgatactcggatgtttgttaggtgagcggaggacactgccgaacctaggggtgtcgacttatgcgcttgagaatatgtttagtatcgacaaggaagggtaggtctgagcgtcgatagagatcaattttcgctcattgagaccacctcttgctcatctagcatcaagcctaatggggattctttttcccatcaagaagctgttacattgctgaatcagcatgctagagctccggccgtcctcgaccttcggataggagctcaggtgatgctagtagtgaacatgccaaatgccggtctatgtaacggctcagtgtgagctagacttgacttttctggtacaagaatcgggtctaacggcccgcggacttctttccaggggcaaagtggtggctttcgagaccgtgatgggtaggcggaccttctcggatcaccgcaatacagtaggctgacctgatctcgcagaggagcggcagcgactatcggaacaaatcgcaaaggagcaagataaacagaaggtcgaagatccggctgtcgacaaggttcgcctgctctcttcgcagaacctgttcctcttggttccgctgatgcagatgtatcggttggccaggcaatgacgttcccgagacaagctagtgaggcattattgaagctgcttagtgaattgggcaagcttggagcgcctcctggacccgccccactgccgaaccagattccgatgtcaaagacgtatcgtcatgatgcggatctagccaagaacaaatggccggtcgtcgaagttggtatctctgcagtacggcttggtcgcggctaatagactagagatcgttgaacgcgcctttgtattctcagttctcgacaggtcagcgcaagctcatcgttccgcaggacttcgaagtcaacagccagaagggagtattagaagccaagcggatacaggtcccattgatcttggcctgggcattgtcgattcacaagggtcagcgtgatgcaaggcgtgggtcagcggaccttgagtgcttattgcttgacgacaacgtttgcagctcaaggcatcacgatgccgagattgaaggtcgacctcgccaagacgttcgaaaaaggacaggcctacgtagctttatcgtgagtcacggaagcccaggtgataagtcgaccctgttgagatgacctggatctacagtcgcgcgacctcgttggagacgctcgaggtaagcaacttccgagcggcaagcgtgctcgctcatccgagagttatcgaatgggcggagtgtctggaagaggtctgaggacgggaccagaagggtgttctgtgaatgcaagcaggtcgtggcatgactgtaactgtatcaccgcgcgaatcaagtcgaggctagacgtctgtcccgttgtatactggtgtagctgaaatcgaattgcggggtgaccatcaaggtcgagtgtacaaccgtcatcaaaaggcaatacagagaagaggagggccaagctgtctatcgttgaagtgatgtcgtgcggaacgctacttcttgcctcccttgggcctcttgttctcgctgagaaccgaaatccaacagcaggggtcagtgcgcgatcaacagtactgacgtccgaatcatcgttggactcactatccttcctcggcggctgaccgcatgatggtaagctttccggcagaggcagcggcgatcatctgttgctcgatcgagttgttgatcttggcactcattttctgttcgaagccgtatcaagtcagcacaatcgtcatgcatgacagccagccgcatacaacgctcttggtagcgagaaggctctgaagactcaccttgtgctgagtggcctgtcgaaccgtctgcttgttcttaggcgggatagccctcaaccccttcttcttatccgccaccttcttctttccgccggaagactgcttggcagcgttgagctttgattttccctggggcatctcgatgattcgattgttgtccgaacgtgatgtgtaggagcggcttgatagatgacaggtgtaggttaagtcttagatagagcagcgttgctgtacatacagatcgaggtcaactgagaagtgaccgaagtggaggatggaaatatgggctcgggcgggcgctttcacgtgacgatctgacagattgcgtaatcgtgccgacaccccgcaagatatccgttaggccgtgacgacgcgatgatcagtgaaacctgatgacccaattttgggatcgcccgtcgaatttagccaaagaggccgaggtagcacaacgcccagtcctggtatcaagatctcttgcaacttctagatgcctcgttccgctttcacaaagaatatgagtgtctcgtccgtgtcgacgcttggcgtccttcgccatgtccggcccgcctgccatcatggactcctttgacatgccatggagatgtaaatgactttcgactccgaaaggaatgaagtaatctcgaagtgatttcgaacgatacgtcatggtctcatgatttagtgcgcacggatctcgacgaagaatcagtttcgcctcccgcgttggcggccaagcagcaagcagagagctatcggtaccgcgttcgctgttcttcgcttttccaaggcgcagaagtcacgatggatacagataagaaggaccgtctcgcggattccttcgcctagccgatcaacgtttcagatgtcggcgcgttggaacggtcctttgacgcgtttaggtggatctgtcgtgatgattgagtttcgagatctggaagcgaagcgatggaaggggccgggtgcgcgcgtggggataccaagtcctacacgagcgggccccggcatacggaccgaccggtgggtcggggactgcggtagcatggcgctcgcggcgtggggaagctgtgccgtgcccgacggaaggacggaacgttatcgatcgactcgtcgtgacctcgctgctgccgctgctgctgagcgatcaccttgtcctgttccgatggcttgaccgtctctcgttgtcaacaatcccgaaggaggaaaagtctacatcacccccactatatatacctcgaccatcctcccgttcatgcccgtccacttgatttgatccttatttaataagctcaacttgaatcacctgcacttccaaatccatacctggacaccccgttcgcaacacccatcaggtgagttcctatcagacccaccgcgctggttgctgcataaccctgattatcaccttactgatctcgtttaccgctcactgccacgtcccccctgacctgattgatcatcaacatatgacctcctttcggatgtctctatccacttctgactgtctcaatcacgcctcactctacctcggatctactttgaacggcgcagatcatcaccaccaacgccgacttttcacccaaacctcgcaaccttcgaacactccatccggccagagtttcccggtaaagacaactcccctgcaaatcgccccaaagcgcatatatccctagtatatgtttagcaacagcctctgctcgtcccacaacgtacgtctttacaggatgcgtatataaaccacaggtcaacgaaatcttacattgccctttttctcgtcgtcaataggctcaccgaggcatcaagcactccagcgcccccccattgaatagaaactaagaccccttcacctccccaccgttacacattttaccacctcgcacctatcccttttatcccttcaaccccgatacccaaaccacctcatcgcaccaggacataccccatcatgtctcctatcgcgatccctactagtccctctattcaaagcggctcggacggtctctcccaggtccaccctaccgccgccaggtccttgcctggtggtcttatcagggtccaggacgaacagagtaccaagtacgatgacgttcaaggagagatcaggagtgtttatgttgaccgtggatgcgaagtcaagagtcagtcctgagcgtcacggccgaccacattacgaacggcatgctgattggcctttgcgcataatagaatcgctcgacggacggctcatcgtcgagaagactgagcagaagtacgagttcaagacagacaccaaggttggcaaagtcgggtgagtcggctatacgcttcagtaccgccataaatcgcgcttactagattatcgagatagtctgatgttggtcggaatcggtggtaacaacggaaccactgttgcggccactatcctcgccaacaagcacaacatctcctggtctaccaagctcggtccgatccagcccaactatatcggatctcttgtcagggcttcgacggtcaggatcggttctgacgccgagactggcaaggatgtcaatgtccccatctacgacatgcttcccatggtccaccccaacgatctttgtctcggtggttgggacatctcgggcatgcccatggatcaagccatggcgcgagctcaggtgctcgattacgatctccagcgtcaggtcgctccgctcatgaaggagatgggcgcgcccttgccttcgatctactaccccgactttatcgccgccaatcaggaagaccgtgcggacaacgtcatccccggagataacaagtgggagcacgtccagaggatccgaaaggacattgccgacttcaagcgggataacgatttggacaaggtcgtcgttctttggactgccaacactgagaggtactcggagctcatcgatgggatcaacgacacggccgacaaccttttgagtaagtggttgaattggccacagcggctggccttgtattgacattgcgatcattccctatcaatcagacgccgttcagaattctcacgaagaggtttcgccctcgaccgtctttgcgatcgcttcgatcctcgacggacaccctttcattaacgggtcgccctcgaacactttcgtgcctgggtgtatcgagttggctgaacgtcacaagagcttcatcgctggtgacgatttcaagtgtgagtaccgtgggatgtagcggacatgagtgagcgtgctaacgtctagtcatatcttgcagctggtcaaaccaagttcaagtcggtcgtcaccgagttcctagtcaatgccggtatcaagcccctttcgatcgcctcgtacaaccatctcggtaacaacgatggtaagaacttgagttctcagcgacagttccgatccaaggaaatctccaagtcttccgtggtggacgatatggtggctgccaacaacttgttgtacgcgcccgccaagaagggcgagaagaagggcgaacaccctgaccacttggtcgtcatcaagtacgctcccgctgtcggtgatgacaagagggcgttagacgagtactactccgagcttttgatgggcgggaggaacacgttgtccgtcttcaacatttgcgaggtgagtcccgttgggttgacgaggcgttcgtcatccggctcactgacttgtgggtttctcatggtaggactcgcttttggctacgcccctcatcctcgatttgaccatcctggccgagttgatgtcgcgtatcacctaccgtcccttaccggccggcgactcgggcgtcaaggaagtcccgtccgagcaggaagttcccttccaacccctctacccagtcctctccttgctctcgtacatgctcaaggctcccctagtcaagccgggcgacgatgttgtcaactcgttgaacaggcagaggcagggcctcgaagctttcatgaaggcttgtctgggtctcgagatgggcggcggtgatctcttgctcaagacgaggacgtggtgaagagagtagagcgctctcgagtgggaaaagacatggaccgtctaggtgtggccttctcatcttcaagaaaatagcaaatcccctcagccccgagggctaaaaatctctagataacttttttagaataagctttttcaaaatgccccggcttgtatatcttgcaaacgatcattaccggtctgatctttcgcgcctttgaccaaaatcacggttctggtgtgcatcgaaagcgaatactaccccgtgattgatcccaaagttactgactgacccacccgcgcacaaagaaaacaaaaagggggcgatagatccccttcaattcacaacaacatgtgttcatcttgtacgagacattgctcctgaaaatcttagccgtatcattgcgcatctagtatcagtataaggatgccgctcctatctgtcccagacatatcgttggcgaaggataccccccaggtgtcgatgctgcaacaagccgccaatatcgctcaacaagccagtccacaagtcgctgctctctaccgagcccgtgtgcggctgctttcagaccttccttcagagagcacacggggatggtgttgctctacatgcggaaacttgagagacgggtacgggtggaagctcgtccggggacagagaaagaagaagcccacgcccaaagaaaagaggatcaagaacagcctggcgagcagctcggacatgctcgagagcaatgccgaggctggtccaagcaaactgaatgccgctcagaggaatgcgttgaaggggaaatgcagcatctgtggctccactttcaaatctaaaggatcaaagagcgagaccgtggccaattttccctcggccaggtctgccgcaaggaagacgaggtctagcagcggtcagaccgatttgcagggctcaacagatgccctggacttgaccgattcgtctcccatccctccggaaatccctagcgagctatcaagcccttctaagccagttccaccaaatctcttgcaagcctcgccatctctcgctcatatccctatctcagacccaacgccagccagctctcctcttcctccgacctctccctcctctctgccttccacctcgacagcatcgtcacgctccgctactcctgtcggcggggtgcccaaagcgtcaacggggagaaagaagaagaagtcgggcttggcaaagctcctggccgacagcgcagcgaggaaggaacaggagcagcagtctacgggcggtctatcccgatggggactcaactgagtggttcttgcgcactcggatcggaagggtgctctcaagcatgttttgtcttggaagcgctacatgacgctctacaactaggctttcggaggatacaacatgtcgatatctctcagccgatcagagacccccttctcgagtatacgcctagaggctgtaccgagcttcgcctcgaactggatgctgcaacggagcctcggcggctcccaggcccgccaatcacatcgaccgccaaagccagaacgacacggcatcccggacagtatcgcaaattgaagcccgtgatgttgaccgcgtctgctgagcagaatgagccaccgcatcctccacaatacctgcgaggttctgtgaggggttatcagcgacctgtattgcccgcaaccaaggtctttccggggtcttacccaaaaggccgaaagacctgccgcaaccagccatgcacttgggagccgcattctccgacacgtttctggcacctccttctggcagcgaccattggtacatggtagctttactcttcggatccgttttgcttggagcaaagcaggcgtacaaattatcactgtgatagacgatgatcgatgatcgatgatcagcgagagcgcgctttgttcaccttgcctggaactgctgctcaccccataaaattgactgccgtcaccggaccgatatggtcgtgcggtccgctcagccgcttcagctcttgcagcgaccatggcggttcgccaacaacgccaggagcaagccgccacaaggctacactgttaccgtagccgacagcaaacatcggaccatgcttggagaagtcttgttcgtagaatgagatacccccattaaagtcgttttgcggactcgacagatttccacccatgctgtaattttggatggggcccattggcgagctgacagaggcgatatgagcaccgttcaaggtaaagaggtggagatgtgtgtcacacagcagggcgatgtgaccctacgcaagagagacttcagttcagtcgtcgacctttttccctgtcttcccgcttttctcaactcactgtggcatcgtcgacggcagcagccctgactgattcacatggctcaacgacaagccgacggaggaatttgaaacgattggtgtcccagacgatcgccgacccatcctcgctagcactaacaaggacgctccacgctgaactggcgcagagacggtttacagtatcttcatggcctcgtaggacggcgactggtaccattctcgatgtgtcggtccagactgaagcagcactccctcccttgatacgccagaccttgagtacaccctcgggtgaagccgtgacgaactgagttgaagacacgaatacggcttcgacagcaggcgcttgttcagctatacacatcacctgatatgtcgattttctccgtcagctagtctcaaaccattgtctgatcaaagatactggactgaccctggtcatgccgaaatagcctcggatcgattgatctgaaaatccgtagcgcaaagagcacgaggggatatcggggtggaagactcgaccatgcggcgccatgactgggggcatctccaatgtcggcgcatggcatatgtcgtgtcctgatactgacgattccgcaactggtagggcgcttcgaatgagaaccgcatagtgttcgtctactccaaagcgttgtccaataggtaatgaggatataccgttgagaaatcgctgaggatgacccagtgcgaatatttgatgaggtgtctgtccaaagttgtgtatgatgcccacagaggcggcgcgctcgctctcgtcactgatcgagtccagatctgagctcttgatgaagtcagcggccaggcgacatcgacgagctagctgttcggaacataccgacggcatccttgtagcttagcggatggaagcaagtaaaggaagcctcgtcatgctgtttagacccgaataccatgtctatccacgagggaagatgccgtgatacgtaatctgactccaaggcctagagagtcgaagattagtagtcttaagcgatcgtcagccggactctgtacatacttcacggtgtcggtgaatgaacagcaatggatcatccagtgcccatccaggcaggtccacggaatcgacttcctcgttggatatctgcttcctgcccatatcaagtcgattgatattgtctagaaacagtgggctatagaagaactccggaatgagctcgcgaacatcgccgcgattttcttctgatgctgagctccaagccttggggacgctcgaaaagagcctatccgctaggtcgaaattgccaccctgtatgaagatagttcaccttcggtcagcctcggagagtcagcaagaacggacaatgcagcttacttgtaatgtcaagaacatctcggtaaagggagatagacgaatcaagaacgagcaggtgatcattgacgaactaaaatgcgttccgaaatgaaaaggcttgtctccagccatttcgctctgttgatatcgctcggttgctgcctgacgtcgagcctctgtcagggcgcccatcggcagcgtcagatctcggaaggtattcggatttgtgagatttaaaatttccgacgagtaatcttttagaacccatggaaacacaggatactgagtcacgtctgttcagatggaaaatcagtatgtcggtatgtcgtgtgggctcaatggtggaccgtaccgttaggagtccgattggcatattggttcaggatttgtaaatatgcaaactgcgtcgccccaaattcgtcaaagggtgtatccaacgaacctgcaagccggacttacattgctcagttgacgattttgccattgtcgggtataggcatcgagctctagtgactgcttgtccattgcctttgctacggtgtcgagtatcagatttcctattaccgactgtttcatcgcgttcggatcgttcttgctccctagccgatgcaaagcagcctgtctctccttcttgtttcggaagacgcagaggaaattgcgtttgtcggcgaagaagaattcaatggctacgtctctgaacaagaaagacctcttattggactccacgacctcagagtaggacctatggattaagggcaaccgggtctctgtcagctcgtgccgatcatctcgtcatatcctgtccgactcaccacctggatgtctccatctcttcacgctgagcttcggtgacattcccggaaggaatgctgaacatgtcacgtggcgcttcctcactaccaactatttcacccgtatccaacttgacaagtccgtccaagacatacatgcacttccttccaagtataagaagcccggctgaacagcattcgatttagcgtctgaagtcatacggttcccgagacagctgcgtcggaacgtacgtgcaccgtcgacccccacagcccgtgagatgttctgcaccggcccgacaaatgataggaagagagtaagacgagcactcttgatcgtgcttgaaagaactcacgaagcaatcttcaatcgaatctcccgattgcattgcgttctcaatacggcgttgtttgctgtcaacgtccgtctcgtcgcccaactcatcattgacactctctatggctagtgcggcggtttgagaatcgttttctgccgatgcgcgatcgactgacggccgcctcgtggcctcccccatctgagcggcaaacggatcctcgccgtgaggctgtccaacatgtgaagccgctgagctcagctcatcctctcgaggcactgctgtacggaatgatcgcgagtagagtgcggtaggcttgtccgtcgtctcgtgcaaaacccgctccagtttcattctgcgagttcattggatcagacaacagacccacagctgtaaagagatatctgaccttttcctcagaggcccttcggaaccgtcgagtcgccagtgaacgttctcagtaacttcaggccacaagcctccgtcagaagtgctgatggcgcgctgctttggccagtcgacgctctcgacccgattccaatactctttgctgcaagaactgcaaatcagcaacctggcgtctagagcagagagtctctctgcgagtgtacttacttctcaatggttgttttggcaaatttggcagattctgcagtgatgatcgattgcttccacgtggcgtttttgtccttgttttcggaaggtttagcttccccggtcagtctcctgattaagggaatcttccgagaaatatagctgcgctttcgttctccagtcgtcggacgtctggtcagacgcttaggtgccacacggccgaaggagcctgttgacaagaacgactttgcagatttggttgacgccgccgaactggaaaggatggaactcgatgacaattccattcccgctgtcgccctgacttgctcccgcagggctcctacctggaaagtaacaataaattagtgcaaaagtagcgctacaacgaagtaggacatacctgctcttgcagcagcatcgggaggtctggcaggtcgtggagacgagatagcaattggctgatgctgcccatgacatctctccgcatcagtgtggatgagtccgttccatcttcatatgttgcgcttagcgagatgaattcagccaagccgggaatcagttcctccagtaatcggttgttaaatagatctgggtctgaatctgcaagatcgatgatctcgacgagcagcgcctccaggccttcctgtcgcttatgctcgccttcaccgcctgataaccaaattagcgaagcgctcgcgacgtttaatctcagaaggacttactagccgtcagcgaaggtaaacaaggggatgatccaaaagcgaccgtcagaccacctgtgggttcccctcgtgctgaactgggcctattccccgcctttgggctggtacggtcaagagccgtaccgaggtactgaacaagtgcatagactacgcaggagaatagtcgaccattgtatcgcttgtccccttcccggtatcgaaggcaagaaaagactagggaggaccagccgtgagcgaacagcaaagcgacacacgcaagatgctgcttcccttacctcgtgcttgtatttgctcgtcccagagtacgggcaagatggtatccagcaaatcaaagccgccttcttcctcgaattttcctcgaaacgattctcccgaggtcgaacagagcatggtcgcgataatatcgaatgccggaagtgttacgtatttggctgggttattggctagaaggatgactagcacgcggtggacaggcaaacaactttgaagtttgtttgaacgctgttcgtcatggcacagctcagccacagcgtccaggagcatagctgcaggggcttgcgagtgagtcggcatctctgggggagtgatgccgaaatctagaggcgatgtcttcccagctggagtcaccgatttgaaccatatataagcgtgtgaacttctagggtcaccgcgctacgctcacctggacataaggtagaaatcaggtaggcgaacaatggcttgatactgttcgttggatcggatgtaagtcattagcttggttatcgactggaaactctcgactcacgaatcttccgatgaccagtggacagcaaagatggtcttcgcagcgtctacaagatcatcaccgtcttgagtaagtaagcagggtgggatcaccagggttaacactcaccgacaatctttggcacggcatccgagtcgaatgtattcgccttgagtgcaaacatgagcattcgagtgatgccaaccttccggaaacacttcaaaatattgaatctcttgaatcgagagtcaaccaggagatgttgaaaatgtcggcagaaaagctcgacgacatctgtgctcgcgcgcgaccagagatctagtcgcaaagccagcgatcgatatgcacctgagttgcgaatagtagctgtctcaggcttttcataatcgattccaattgacaggaatatcgtcttcaggactgatgctgtcaccaggtcttgcattttgtttcgcaaaagacctgccaagcaatcgtaaccatctgtttcaggaggtattgaaattcagcggtttgaacctgccttgagtgcatcctactttagactgacgcattcgttccatctcttcgctggcctgccagtcttctttaacagtgttgaagaggatcgatactgcatgttgaagctgactcggtctattggccaattctaccagatgtaaaccagcagaaggtccccccgctgagttaaaggcttggtccagcgaacatccacgcatccagaaaaccccatccgacacattcgctcgtcctgacgcggtagcaagcccctttgctacagttggcgtggcagcgttcatgacttgatatttggtagcgtctactgaatccaatttgcggataggagagcggaccacgttttgcgcgcccagggagaaaagaatggtgtcttccgaaatgacccggccttgtttgatgcctcgtatgagataggaatttgctggcaaggtcgttcgaatgccctgtcgcgtgactttggcaagttgcgaaaggtaaatgttgagcgaggtagctccctcgtctggatttcaaagtgaagaagtaagggatatcagtggaggcttttcaccgaataaacgacttgctctgcacacacatgtgagaaaccttcccagaggttcctgaaagttgccttgatatcgagggccctgtcgagaagcaaaatcagatttgttgtttgcgaatatgcattccactgcgatgatctcaagcttacaaggtgatggaacagcaagcaaagatcatcgccaatgtattcgcgcagcaaggtggattgtccaagataccacaggctcccatcaagtccgcgatagacatcatcttccgggagcaagggctctttgtgaaccccttcttgaccgatgatgcattccaagcttgaacctttggacggaccaggatagtcgcacttgacgggccttccgcatcgcttgccattgattacgagcttgacctcgggcccgacaccgttggcagaagtgttcggaggcgcccggcctccgattcctatgtgtacccagccttgatgaggtaccatggcgtcactgccggcaaatacgacctctcgaggtgcagctgtctggggctgtttctctgttctgtcgaaagcaaggactccaatctgagagtccggaagaaccctgattcgcaaaacagtattggacccctcgcatgcgtgtagcagtaccacgggtgcacaaaggaattcgatgtagatccaggcctacttcaagcgtataagcacctgattggtcaagatgttgcgcaagagcggcttaccataaagtagaaaccccgttctttcgtcggccactgctggaccccattaagagtcaagcatccgccgggacctttgaagccgaagaggtcaggccatctcttccccatcccgtggctgacagcctcaagcatttcgttatccaactgatcggccttgcttccgcccatcgacaagccattgagatcgagttgaagaaagggctggtctagcttcctacttcgagtcttatgatgaccggatggcgatgctgaagtactcggcgtcgacgttccgctggagtctcggccagatttcaccggcaatctgcccgtgcgctgcgtcaaagtgacattctcccggcgtaacagcttgaagagccgaaagcttagacgaggatgaacccctgcctctagcaaccgtcttagcactttgagcagaatggtcttcgaattaccatcggcggctggaaggtacgcagtctgcttctcgctcgcggctgcaccagctcgacttcctactccgacagcgaatggatcttgagcggcgtcatagctccatcggacccgcttatccaagctcgatctcctggcttcgagtttctgtgctatcagatgtgaagtgggagggtgcagcctgtcgagaacgcattcgaccagtcctccagcacccatgctcttagtcacgtcgaacaggttcatccaactggactggatgatcaccagaaccaacctccacagggtctgctcgaagattacgagctgcttgggcagcaagagacgacccccttcgtgatcccggggccaggtctcgatctttctggccggtttgtcgaatcttgaacgcctggagcagatgtagggcagcggcagaatatcgaatgccacggccaggagttgtggatctgagaccgtgaggtgggatgatatgggcagtgctccgggatagggcttcagatcttgcagagccgttgggttgaataggccgagcagagaatcatcgttggacaacgccctggaccaaagtattccgagaatctggtgatctgggagagattgttcggcatagtgttcgtgacggccatgcgggtcctgtgtactgaagattgccagacggaagccttctgcatagatccgccagcccatgtgctcctgaggtgttgttggtcatcagtgtcccgctgctgccttcgcatgctaagcgacccgactcacatcgaaccaacgtcgattcctctcatcacgcagagcttccactgtgacatccaaagcgagcctgaagacggaaagtttgtcgacccttagatgatctatctcagcgatcgcgtccatcttgggtgatcgtcccttgccgtcggtcgggccttcctgctcatctcctttcctggggcccagtttcgatttccagagaccatgttgaaaggtcggaggttcaccaagctcgctatctccagctctaatcttgtctggatctcgaaagaggtcatccaacacgcctttggtcgcggcaaagccatcactgctgcggaagagctggaaacgagtcgtagaggccgaagtcaaccagctggagatcttgctaagtgtctgtggagtgatgtgcagcatcagcatatgacgaatcagctatgcgttcaactccccgaaacaaacctgtatagtcagctccaactcttccttgctatcaagcttcgtgcggctcagaacctccaaggagtcttgaaaaagcatttcctcgtctgacaagtcgggagcatcttgccccgtctgctgtttgggctcttcagctttcttgccagtgccgctactatgggcgagtccagtactcgagctacttcgaagctgagccgaagtgggctctgggcgctcgggcacagctagagcttctttaagcagtctgaacatggccaaaggtcgcagcaattgtggtcaggctatctcaagatggatgcatggctagtcttggtcttctgatatgctatacagatgaagcgtatactccttttccccagtccgaggaacctgtttgaacctgttaaggcagaaagctcggagacctttccaacattcgcagagtagctagcccctatccatcgagctgccggcctccggggacccgtattcgagcgacctggggatcgtcgtcgtcgtcattaattgggacggaagctattttacttccgccatatcgatcgaaaccatgcgaagtgagcatgtcgcgtaacttctgacccgatgaaaatgtcttaacgactgtggtatgatgatgcagatgatgcagatacgagtacaggtctgacgtcttatatggcaatcctattgttctcatcaagctctcgatagctcttgtagccatcgacttcgaatgtcatccctgtccgcaataaaagtgtagtccttctccgcctggcaagtaaccaacagcgcacgtcagacccgaaaatcagaagcaacacaattcgacgagagcagacataccgtctgtacctgaaacgcccgaggacccttaggtagcaccttggtgatcgttttggccttggcaggtacatttgcctctggcacgggctgtaaagctgcaggcgaaccagatgacatggcgaggttcgaggcaaaacactcgctctcaaccttgatccgacccttgactgcgtcctcttttacgcagagtagccgggaaagattggtcaggaccaatgtacgtcgctttggaaggaagatccctgctcgagtgagaacgggcgattgatagacgatgttttcaccttcgccaagatgctgagccctgcgatgagaaatagaagctgtgagacttctgctcaatacaatacatgaagttgccgtaactgaccatagcttccgtctctcctcctgctcccattgatgagtgagcttccgcgtcaaaacagtctccttgtcgacagtccccgcaccggcagaccgcaactttgcgcgagcggctgcctcctcgaccgtttctgtgctcgaaaacgtattgccacccgcctcgatccactttcgctgagatcctcgtaagtgctcggattgaggtccaagatggttcgggaagggcagcttgggctcagtagcaggactcgcagtagatatagcgaccgcgtcatccgagcgaggattgagagcttcctggtcgatgtcatccccaaggtcaatttcatcacgctcggtgtcactctccggcgcatcgaacgcgtcggtaaagtcgatcttctgctgcaccatcttgataggcgggagaagaccagtctggatctcgggcatgtgatcggtccatatgttggcgaaattgatagagctgaagaaaggatcacctcggatcgattcgacagtcgggcgctcggtcgggtcgagtttctgaaacacagtaagtgactacgttaaatcacttgaggacaaaggacaggcgctgacgtaaatcagcttaccaaaatcctctcgatcaaagacctcgcgagcgggtcaatctcgtctggaaattcgtattcacaagcaagaaccttttggaacgtgagatattccgtcgctcctcgaaaaggtggtttgcctgctatgatctgatacaaaatacagccaaaagcccagacatcggctctgtcgtggggaaaggatatcagatacttgatcagctaaaacgagaacaccggcagaactctcgaaagatctacgaactgtatgctggcatgttcattccgaagcacttctggcgatacgtattcggcggtcccgacaaatgatcgttttttgctctcagctgcaaacacggtacaggtcagcgagaatgtcattctaaacgctcggacatgcgaaacgtaccctctggcacctcaaccggttcgagagtggtgggatcgaccaccttggcgctcccaaaatcagtaatcttgatgcgccaatcgtcgtccagcagaatactgagtcgtttgtcggtcagcgccaggtatggtaacagctctcaaagacggtggctcacttttcaggtttgaggtcgctgcgaaatccaaatccggatcagcactagtctctttggcaacacggacacaacgtcagagattcaccgatgaattaccccgcgctcgtgcataaaatcgatcgtatcgataatctgggctccataccgtcgcgcagaatcgatatcgagagatccgtgctgattgacaaatagttcagctggtagtgtggaccacatctcggattgcgcttgtcttaccttgcgaacaaggtcaagcagttccccgtttatcgccaggtcaagcacgaaatctggcaatacaatccgtcagtcatcagctctgcaggctgttcgatatatgacccgaccatactcacagagactcgtgtgatccttgaaggtgtaatgcaatttgatcactcccggatgactggcccgtttgcgcttcctaggcataggcctgccggaatcgggtatttcggacgaggtccgtccagcggtggtcgtcgcctctgagggactggtagagatgacggtcgaaggggaccacggctgtccgaccacctccttctgagggagctggggcgaaggtggaatggcgagacgggaaagatcaggcttgatagtctgctgtcgatcctgctggggcaccaaatgctcctcctgctcgacagacttgtcctcgtcctcctggccattcaaggtcggtagaggtgtctgctcgaggttcatggtaggtgtcgtcggcgttccatagctcttcccataactggaacccgcagctgaaccttgaaacgtagatgtcctcctagctggaacattccacccgccctcgttgctctctcggcgtcgtctcggcttgccgggatccgtccccgctacaagcagagttccggaaatgctgcctcccgcactgctgctcgcgaccgaatgcccactctctctccgcctgtgacccatgcctgcaggattgctcaagatgctcatggtcgaaccccgattaccatttgagcggacttgaggcccaagccgaaccaaagcgtcccgctcgactttggcatatttggtctttttctgctggatgaggtgagcttgatcgaggatcttgatggcgtaaggaatgttggtagcattttgacgagccaagacgacctagagtaaagacttcggctctgcagatgtctttggcatgcatacgtatcgaccgagaactcacagtactgtaactgcctctcccgatcatctcgccaaacgtaaagtcttgtagacccacgacctttctgacatctcctcgacccgagcctcctccctgactggcagtcgatccagcaacaagaccaccccctcctgtggctgcgaccttgctgttcatgccggcaccaggagtctgtccggaagagctcctcgcccggctctttctaggggtaatcgaggtcgtagccatgatcgtttccatcgtgcccaacctgtccgaatgtccctttgtcggggaatcaggctcatgatcgtcctccgccagagcggactctccggccatcatctgttgcctaagggatgccaggtctggtcccgatgtagagggtcgaagttcgagcggcaagaggtggatcggggcaggatgatgatactgttgagcagttccatgacgagggcttccgaaggtgtccctcgactgattgaaagcgtacttgtccggtctgggcgtcacaggactccgagactcttctcgttcgttccgatccctggctcgagcgttcgagttgcgtctgatctctcgttcctgtcgatcaatgtcatcctgagatggcagctgagcatcattcgtggcagcggtccttgtctgaatgggaggcggacggataggagccgcttctagtgacgaggttgacgacgtcgtatggctcgaagactgagagaagttcctttgaggtggagacggaggtcgttcgcggacgatgcgaatgggttctcggtacggcatcaaagcagagggaagccgaagcgacccaagtcgaaggctcgcgaagagccgtgacgacgactacagagcgtagcgatgctagtcccaagatggttctgacgtgatgatgtgcatattcaagtgacatgatacatacagagagaggtcgattgatcgatttcgaagaaagaggtcgagagcaaccgttggtgcggaaagcgggtcggtcgctgcgggtgtaagggcaccatcgaccgagcgatcgagcgaaatatacaacaaacgcgagacgtaagggaactcgaagcgcgcgggcagcgagaagggaagaccaaaaggcgacaggcagcagcatgttgctgattgctattcagtggcagctggcggacacagggtgaggagtgcatatgtcgagcgcatagactggccggtaatccgtgcatgcccgtattatcaacctgtaggcttcctgcgacaggatcgacgctcgtccgtgaagtccgagcctcttcctcgttgaaccttgcaatcttgcctgttcatcgacgccgaacgctccgtgcagcaaggacctttatcatacacttcaggggaacgctattgtcctcgctatcggcgtgtctgtgaattcacagaacagctaactttggtcctcagagggaaatcgaatgtctatcgaagcggtaacgcgacatcaactcgtcatgctcgtcatagcttgatcgctgcatcactagatcggacatggtcacgaggtccgcgagtcctcgcaaaaaccagggcgacgcgaattgactctgttgaagccggacccaaatcgttccggcaaactccgttacctgcgggttggtaaatctcgattgtccgaagagcctgcagcgatcagcgatcagcagagcagacccgatgacacggtccgggtcttcatgtttgatttgacgttcgtgaacgtgccgtttggtttttcccagcgggaactgaacagcggttctgtccgtgctcgatcgaagggtgcggcaattgcctgggggcttgaactcgcacgcaacggcaacggctgcggaccctgtcgcgacatttttgcttttgccgcacacgatcaaatgccccattgccgcatgaaacttcaataggatgacatgtgtctcaaaccgagtcttcagaattgcacattccaggtcgctcgaaccggaccaattcgtgaaatctcacggtgttcgacaaaatgcttccttggcaggtcgtttatttggtttaacatgcgaactcggggggttttttggtggattgcctgagatatggtcccgctccagtgcctgaactacaagcgaaccgccggtaccgtccctttttgaatgagcggatgcaagcactctacgacttggccaatcagcactcgactcttagcctccaggccagaacctcggcgcacgcaaggcgaaaaccgaccgcggagattccgatcgaacggctcatggccgcacaagaataggcgaacagaggcacgctgacggcatttagagtttgccgccaagtcggttctacgaatccctccgcccctggggccttctggttcccctcgataattcacacctactcccgcattccccatttttttcgtgtgggcggcatgtctacctcacgggaccccttgggacgccgtagccgccggtaagagaacttccatcatcgagtatataatggttcgcgagatcgaggtcttgtagttgagagtctcccgccatcaatctccttctcacacaccaccaacaaatctcttctcgttctcctccactcctagtcctccgaggccctacgatcttctttacacctctctcccttcttcttctcaccacttcttcaaaatgcccggcgccggagtcatcaccggtcaagtcgcgggtgccagccacggcaaccctctcaagaacggtttcatcaccaggcaatacctttgggccttctccttgaccacctcgctcttcttcttgtggggtttcgcttacggtctcctcgatgtcctgaacaagcatttccgtgagtcgcgatctcgccgcgcatgatcgttttctggtcctgatgagccgatattgcaacgctcagaaaacaccttgggtgtcaccaagctccagtccaccggtctacaagtcgcctactttggtgtcggttactttgcttactctcccgttgctgttagtaacctgttgagatggcgcgatcgtcggaaccttgactgacgcgctctcgttctatccgcaggccatcgtcatgaagaagttcggttacaagaagacgttcattatgggactgtccttgtacagtttgggagccatcttgttctggcccgtcgctgccatgagcgagaagtcctctaacaagcaagccatcttcggaggattcgtcgtctgcaccgccgtcatcgcctgtggtctcgcaacccttgaagtcggcgccaactcctacgtttcgatcatgcctcctgtcagcgttgccaacttccgtttgcaattctcacaatccttcaacggtgtcgcctcgttcactgggtgagtctttgcgaatgtagcaatgcgtaccgatcattggcattaatacgcctgtcctactagtcctctgatcgcctccaagtacttcttcggtgatgagaacaagaactcaaacaagaacgttcaatacgtctacttagccgtcgccatcgctggtgtcaccgtcgctgctgcctacctcttcaccaagctccccgagcccgatgtcagtgactcgatggctcaggagaaccagatcatcacgaacatggacggctccgaggagaccaagaagcagacctacctccgtatcttctttggcttcgtcacccagttctgctacgttggagctcaggtcaccatcggaaccttcttcctcaactacgctcacgagaacggtggtttcaccgaccagaagggatctcagatgctttcttacggtctcatcacctttaccgtcggtcgattcgtcggtaccgctttgctcgccttcatgtcggctcctctcctgttggccatctgcaccattgcctgctccgccctcatctgcgccatcgcttcgctcaagggaggctcgggtggagtcatctgcctgatcatcatcatgttcttcggtaagtcgcaagtcgcctgttctcccggtcgagctgcaaattgaattcgatcaatcttacagagtccgtccagtaccctatcatcttcgtcttggccactggcaacatgggccgatacaccaagatcgctgccggtgccgttgtcatgggtgtctccggaggtgccgtctttccccctattcagggtgctattgccacctcggtcagcactcgagtctccttctggatcgctctccctgctttcatcgagatcttctgcttcgccatgtggcagtggaagcgaaccggtttcgctatcggtctccccaaggacatcatccccgaggtcctcgaggaggaggcttcgtaccacggcgacgagaagcccggtgccaccgacatcgacaacaagaacgagatggagtacgtcgagagggctcgatactaggtatcgtcgctatcagggtatattttgtagcttttagcaggggttttatgcgggacttttagacagtccacatcactatatgataacgatctctacatgcaacaaattcattcagttgagcgataccgttcgcgactcttcgtgaattgtgcgcaactcaagctgttggctcaggtgtgctcctgtaccaccttcgagcagcaacgatgtgttcttcagagcagagcctcgcggctcgcaattccgccagacccgatgaggcttgatacatcagctgacagctccttgtctccaaattaacggacgactctcctgcggccagcatctggcccgtgccaagcggagctctacgaggtcaccagacaaggatatccaggtaccgctatacaacaacgctatggcaaatcccccgcgtttcgcgtacgatgacggggcaacgaggggcaacaatgtcccgaggctgtgactagcgcagcgctaaattacccgaccaacaccgatgcagcatataaagcttgtgacagttgtagctcgaggtaatcgcccaaccccattctcaaccttgtcattgagcgagtgcatctactttctggaggctactatctgataattgccaaatcagcaaaatggcacctgttccgaccgactacacgcagatgacgaagagggagattgtcttctccttctccatcgttacctctcttttctttctttgggggtaggtagcattccgaaagagcatcaaaaacgaaatctaacggtgtcccttgacatacagattctcctacggacttcttgatgtattaaacgctcattgtaagtctttctcacaaattctgctttggagacgtgcgtagcggtgcaagttcgatcagctcatcgcgtggattcagttttagagatcttcgagctttcgaggacggaaacgactctgctacaattcgcctactttgtcgcttatcttctggtggcccctcctatgggaattttcatgagacgttacggctacaagatcggcattcatgttggtttagcgctattttcaatcggtatggtgacatcgtattattgtaggttcgtcgctgatacggtttaccttatgacaatccgcaggggctgtacttttctggcccgcagcagtgtgagtgtgacccgtgcatcattatctaggctccgatctgattgcttcgcaattcttagctaccgggaatatggcatgttcattgctttcacctttgttattgcatcgggtctcgctactttagaagtggtacgtccttgacaaggttcaattttgtctctgctgccatttgttaagcatcatattcggcattgtaggcggccaactcttacatgaccctgttaggtcctcctcaatacgctgcatttcgattgacgctggcgcaagcgttcaatggtatcgccactgtcatcggaccgttgattgcttccaagaccttctttgatgagagtgataccagcggatctcttggttctgttcaatacgtatatctggccatgagctgcttcggcgtgatcctcaatgtgttactcatcttcgccaaattacctgaagtccgccaaattatcgctctggacgccgccgagactacctccatcaaggggttcctcaaacaacgtcatacaatttatggcttcgtagcagagttcgcatatgtcggatctcaggtggctgtggcctctcatgtgatcttctacctcacgaatcaaccgggagtagacaagatcagcgacgcgaccgcatcaaacatgttctcagcgtgtcaagctgtcttcactgtgggcaggtttattggagtggtctaccttcgatacatcgatccctgcttctctctatttgtcaatggagttgggttgatagtattctcggtgttgacgtcggtcattcctggcaaaggtaagcagacccatcggtcaggagtatcgaaacgtgctcagtacaaggatcgattgaaacaggtggaatcgcttgtctattcttgatcttcttcttcgagtcgacctgctacccgactatcttttccggtgagtcttcacctcaaatattcagagaggactcgccgctgaacccgtttcataccgattcatcggcatgacagtggcaacatcggatcttggtgtttatgctaaattaggctccggtaagctagacgaacctcggtgtcgtggcgaaatacgagtggaggcttagtctatggccccttcccctcttcacaggtctcatcagcgctggtgtcagcggaggagccgtctggcctgcgatgcagagtgccgtctctgatcggtactcggcacatatttcctttctcatccccatgatcgggttcatcccgcttaccatctacgggttggtgatgtggatcagccgatccaagaggtacaatgacggcaggatcactgtcaaagtttaccagcctcctctcgagatcgacaacgtcagtcacgagaccgatattcaccacactgaaggatccgaatcaaaggtcgaaacagaatttgccgagcataagtcccggtaatcaatgaagcgagaggggcgcggcgcagagaggtagacactgggagagccagatgctaaataccgtaaagactataacgtaatgaaatctgatgcgggactgtagcgtatgcacgcttggaatctctttttcttttgacggtcctggtcctcgttgtggtttccggtcagctcatcgttagaaggcgctacagttgctacatcagactcagtcatgtctctgtcgttctgttaacaattagcccttcgtccccgatgacgaaggcttcttcgagcgatgactgaggacccttcgcgatcttccgcctgcagatcgagttgatcatcgataaccctttggacatggcttcgcgttctatttcggtcgcggcgatgtgtccttaggcccaattgatcccggccgcagctgtttcaaagggagcaggaatgggttccgggtgacacgcgcgggtcgcatcatatgttggaagcgatagtgtccgggcgaatcgaccctgcatcccaggacgtctcgacatgtagtccttactcgaaaagtgcgcacctatgttcatttgtaaaggtttcgtaaaataggcattgcgatcttggttgaaaaaggcatgtcagtatgatggtgtgggcgatcgtcttgggtgccgagagtacctttcgggaagaggtctacctcattcccggcgaaaggaggggaagattcagcatcgactgtctcgtagaacccatgaggctataagtacgacatgctaggcaccggcccgtatttggtattgaagagtactttgcattgtgtggaagagatcggcagagcttgatgcgccgggcctggagtaagggaatcctggtttgtccgtttgcgtgtctagcgggtgagaattcgggaaaggctggtcaaggagggaagcacttgtccgacctctcgttcctccactagtccggcacctaggtacgttggcaaaaaatgacaaggagtatcgagctttagtgcggccgtcttgtggcagacatgcttacagaatccagtcttcggggatgcagcgagactcttcatttgaaatttcacacaaggcacaagcacggcttcttgagtaatccaccccttttatctcgctcggcctgctcggcatgatacgacgacgagaaaaagtacctttgagatctttgtttgagattcatttgacatgcggaagcaaatcatcgttggagcgagatattggacaagctcatataaagcaggactgaagtcagtcggtcggagcagcaaccttagcaccaatccttacagctatactcctctcgatctgatcactccctatctgcggtctcttcgtccactattaggcattttaagtttcgcggcgttcagtactagtatatcttagtgtaaggctataaccttttcggaggcgcaggtaatggctgaccaagccatgcgatcggatggctgctatcgatggcgtcaccgcggtatcgctacctccgcaagatgatgagcacatcgagatactctccagctccgggaattcactcaaagtcaagagaaagaccctcatgctcaggtcagtgctttatctggaagtacaagtacaccgctgcgcttctcatatcaccctaattgtttcgatgtctctcagtcatgtattcagagacgccttcgacatgagcgatcgaaggtcgtcctctactaccggaacggttgatatcacgcatcgtgccgcaccgctcaagatcgacgcctccaccgacggactgaaatggctctttggcttgatcgaaggcgtctccgtcctggatctcatccctccggtcgcgaagggcagggagcgatcgcagcctccttccccccaaccgatccacgaggcgagggctctcgcggacaagtacgacatctggctttacgatgccgtcttgagtcaagctctgttcatcttggcttcggaggggaaatatagcgctgttaccgctctcggattagggttccacatgtctaacgaaccgctttaccggatttccgtccaaaagttggagggaatgccagcgcctcctaagatgggatggaatattatcaagactatgggaccagtagcagcatggtcgatcaccaatgcatactcgcggtgcagggggttctgtacctgcttcaacctttgttacagttctcaggagtgcaagaattgcaaaggtcttctgtgggctgatacgacccttcagtggctcgaacttgctaagttgatgcaattcgtcgacttctcatcccttgagcttgacaatagtccgctaggtaagtccaaacggccttcaccgcagctacggacacgtccttatgattgatttcaagaataggtaccttcgcaaatgcttatttgattgcggaaaggaacgacaataaatggcatcggaaaagaatcacggcctgattccagccttcgtacaatatgttgtacctgtatcattcctgtcgacgcccgaatttacgtatagcgatcgtccatttacgtttgaaaatgtcgcgtccgctgttcaaatgcatgtaccggcttctctcccgtactgcgtctcgaacgaagtcccatatgcgcttacatcaaattgatgagcatttacaggatttggcaaatcgaggctactccgtcatctcatggttcccaagagccccccaggaagagcgcttgcaggtataaacgattcgcgtaatgctctgcgtgcgattggaacatagtagtatccgcactcgcacgcttccctcgcatcatcacgcacatgcgcacagacatcctcacaatgtctaactttctcaagttccttacgagtcagtaggtcaagggtcgcttcacgccgattctttcgcttctggcgaaataccgttcgtcgtcgaggtccctctactcccaacctcgattgaacggagaaaggtttcctctgtatctatacaccaaacggacgccctacagcttacgcaactagcaagctcctacagccatgtcgggcaggctcccattaccctttaatagcactgggatgcctagcggtggtgacctgttccgtcagctgacactctctcacgagagggcgcgatggcgatatcgcgaacgcaagccgccgagacgggtatcggcccatcccatgtcacggctatgtgtttactgcaccaccccgaaattcatcggtgacttcaatgtcgtttcgaacaagggtttccggaaacaccatcttctcggccatcaaactccaggatgattagaaacctggttgggggaacaatttccctgcctctcaatactgtacgttgcttacatggacatccgaatagcgtcgcctgtagcccgcacactagcggggtcgacatgcgcgagaccctacgttaatgactggccatgttttaatgtcatagactcgtataatcaaggcctgggagatcgcctgcagatggtgtaccgcacacctaacaaggtatgcgctctgccattggtctgcgtatgaatggctgacggaatgtccgaccgaaatcgcccgtcaaggtgtggacgatgggtatcgcctcgtatctgcaaccaacaagagcaagaggggcgactgcgcaggccttgcctcgaataacgattccctataagtcagtgtggctccctttagtcttatccgcaataacaacatagaaaacctcgttcggctagcccgagtatcgcgatgacgggcagcggtttggttttgtcaacacatccgtgtgagtcaatttggatagcttggcttgctcttgcctacgtagtcgcagcgagtgggacacacagccacgagtcgacccgacaaaaatccttctgcgagaagacgagattctttgtattggtccaggcgataggctacaacgttgtttgtacattccttagcaagaattgctactgacgatcattacctagttgctcccgagaccttcaggtttctcattccagcatgcaaacccggtgccgacgatttggctggcgacttgctccgttccttcttttggctcttcagtagtcgccgcaaatctgccggccgagcccaaaacttgatgcctcctgctcgggaaacggtcaccacggcttcttgaaggaaggtgagctggttcatcatgcacggctcgatgagcttggtctgcgggacgtaagcacgtggcgtcagctgagtctcaacaaaagcccattcgatcgcgagtagctcaccatgacgggctgtagcattgccacgtcgctgcggagcggggccgcgtggtatgttccgccgccgctcaacgcaatctcgtccccaggattttgcatctcgtctcgacggttaccagcgttcaggtctgcaaccgacccgatactcaatcggtgatgagcgtgaccgtgcctaggtcgctgcagggatgccgccgagaagtcccagaacaagatcctgccgtcttcgccgacacttccaaatcgatagcctcgagcgttgcttcgtcgacgatcgaacgtgatggacgtgacatagctcgagtgaccctggcaacgagcaacgatccggccttcgatgggcgagtagatggtgatgaggtcgtcctggcctcccgtctgcaagtatctcaatcagtaaagcggtgggttagagtgcatgagtcccgcgacttaccaagacgtatcggccgtccgggctccacaccaactgcagtggcacgggtatcttcagtattgtcgcataggatatcgcaaggtgacactcacagtggtcagggcgccgtaatatccagcgtacacgtccatgattctaagggaggggagatctcgtcattcgactgtcctagtgattaattgatgcagatggcaaaacactggcttacttcgaactgttgacgtcgatcagcttgagcgtcccatcctcagatatcacggccaagacctggccgtcaggcgaaaactccatttctacgtgtcgtccgaaatcagtaccgccggcccgctaatatggggcctggcaaaactcacgtctgacacccttgacgccgaccttccagacggcgactgggttcctgcccgcccagctcatcagcccgccttgcttttcggcgattttcttgtcgacgacctgttcctcgtttttccagatgtacatcatctcggcccgtttcgcccgctgcctctcaatctcgacctcgacggcggtatccggcgaggtctccgctccgtccaggccgaggaacgatgattcgccaaccggacgggcctgggcttcttcctcggtcttgacgaccgcgtcgctcatcccggccgaccagggcgtagcgacggtggtgacgaggtaaggcggatcttcccgctcggtactaaaagtgaagatgttgccatccgtgtagagcacgtagaagatggtagggatacgggggtgccagcggatttgagcgattgggagcggatgaacgattccctacgaggagcgagtatccgattgttagcgagaaggcccgaaatggtatcacagacgagatcacaccgactcactcccttgctgaatctggtgtactttccaaagataggatctggagtgtgcgtgaatctcgttagctgaatggaccacctcctgtcgagctttcagagttgccaacgacttaccaacccagaccaaatcccctgtggcgaacccgaccatgatatccaacctctccccttgctgcccaggagccaccttggtcgtctcgcagatcgcatgcgcggtgacgttggccgagaaccacatcctcatgatcggttccttctgcttgcccgaggggtcgacgaacgcccatacgagcgttcgtccggtgttcatgaacgcccagtgcgtgggaggggggtttgagcctctaggcggggtgtttgagaaatgggaggcggcgtagactgtagggtctaggtgagggggattgttgacgaggcgttgaaaagactcgctagcggagacacgggtgacgaaggacgagtttgtggaacggaggttgttcttcggtcgaggaggtagtcgagacttgccgccaggacctcgagctccgtacgttgcttcgtattgcagcttgttggcggctgaatcatcctcgtcttcgtcggacgacccagcattatcggtcttgcgattggcgccctgctgctgttgctgttgttcctgcttcttggctccaccacgcccgagcagtcctccaaatccaccactgctctgggtattaccctcgttcccggcacgtccgttgccagcgatattgaacgtgacaaagttggctcggatgggccacgggttcggaacaccattggtaccgtttccctgaccaaaagcgggtccagcaacaggtccaccgggagcgaccgggctggccgaagcaggcggtcctcctcccataccaaacattcctggtggaatcccacccattcccatcccggccatggccattgctggactcatcccgccgaacccggtggcaggtggacctgtcgggatcggcataggtggaggaagcaacgtcgaattggtcatcatgttggggatcaacgtgtagtttccctctggagaggaaaagttggctggtgggaggactggtgcgttgggatcgacgtaggtgggcatagggggtgggacgtattgtcggacgacacgctccggcatcggaggaagcgggaagaaggcgggtggagcaaacatcttgtagcgtgcctcgattgggtgtacgttgtagaggtatgtatcgggtccctgagccgagatcgatgatgcagttctaccgttgtgtatatgatgtatcaagtaggatatcaggacatcccagctacctgatgctgctctgttaacggcgatgatgatgccaccggggtcccacaggccaacgacgtggggaggggaaggagagggaggcagatgaaaacgcatagagattatgttttatgcgatttcaaacgccgtgtggcagggaagcccagttctagacaacgaagcaccgacctcgtgtcgcatcatctttcggacgaaagtcaggtccatgtgacccctctccaatcttgaacaatgatcactcgacttggtcgtaattggtagaaccggcttagcgaatcagctctgtcaatcactgatggttatgggctgtttcgatccggaatcatcaacgcgcttgtcttgagcgagtcgtttcatcgggtcaggaaggattgctcctccaagataagctgtggcggatctcgttgagaaagctggatctactctatgcttttattgaggaaactatgtgctcccaaaagagtcccttgtttatcagggtcttcccggcgggtccgacggatagagatttgctggaaacaaaaaaaaacgttttcgtgcaaaaaacgcaaaaagaaagcccattgtggggatcgaacccacgacctgccgattaagagtcggctgctctaccaacggagctcaacgggctaatccgaattggatgtgtgccaagtcaaaagtaaatttatatattcaaaatcaactatccagcttgggttcaaccgggcaccatcgaccaggacacagatcgctgctgcctgatcattctatcctgattcacctagatcctcattcaatttgtgtgcgtctatcactcatcggtattcaaccatgtatagaggccgttcaagatccccagaaaatcgttcagatcgccgacatggcggtgaccgagatcgaaacggacctggaccgagtaggccttcgtacgacaggcgggatgacgggaaccgacgaggcggacgagatgatcggagaggagggtcggataggccgagagacaacggatatgggggtagagatagagcaagggagtacacatcgcaggatagggagagggagaggaaggatcagcgagctgggtatgatgatcgacggagagagtctgtgagtccagcttcggcacccaggtcacctcactcgcaccactgtctctgacaaccatcgtcctcccttacctcaaaattgaaaaggcctcaccaccggccaagaaggaacctcccaagccgaacttcgcaccttctggtctgctagcagccgagaccaacaccgtcaaggtcgaccctgcgaaagcagccgcggctggaaaggccgacgtcaagggagtgctgctcaagtacaacgagccgccagaagctagaaaaccgactcagaacttcaggttgtacgtcttcaaagggagcgagcaggtcggtgagtcatgatcgagaacgagaggtcagcgcagtggcggatagctaatcgatccgagccacaacacagagctcatccagatatatcgccagtcagcctacctagtcgggagggatagaatcgttcgtccttcaagtatctgcagacctgacagatcctagctgactcttctactctatgggatgcaggtcgcagacataccgatctctcatccctcggcatcgaaacaacacgccgtcatccaatacaggcaggtcgtggagaagagcgaattcggagatatcaagactcgtatcaagtgaggccactgtctgccctcatactgcttggtttgatgctgatgcaagacaccttgatggaatcttcagaccgttcgtgatcgacctggattctacaaacggcacattcgtaaatgatgaacagatcccggcttccaggtaggtcgtcccgtgcgagacatcggggaaatgaccgtttcttacgtcctatcttggtacttgatcccaacagatactacgagatccgagagaacgacagtgagccgactagttgacgtgcatgtttaccgattctggagctcatcctcgctacggccttccgctacagttctcaaattcgcacagtcgagccgggagtatgtgctcctctcggaggacagcgcaaagtaatcggcaccacgacgcttataatatgcattgctacatttggactatcatgcatgtcattgctggcgtgaatgaagtcgccgtgcggctggactccatgatattgggagcgatgctcaagtcttcgtgacgtgccactttgactgacatggattggtgcaggatgatcaaaagcgcgccccagacgcatgaatgacgatccatgccgatgcatgcatacgggtgatagcctggagttgtagtgcggaggggcatgaagacgcagggtggacattgaaccgctggaagctgaggtcgacatatcgccgggcatagtctaaacacggcgggtccaaattgtgaacctgctccagaaatcgagtcatcgtcagttacttcgcggaagataggaaagctgctcacatggaccccgtctacgttacgcatcttgacctgatgtagctcctgttttctgctggtcattgatgcgtcgctccgctcaccgaccctaaatactgcccgctgtccggatcgaggctggaacacaagcatttgatcgtggtcaagaggtcaacataatcggctttcgccgtgctatatatatacgagcaagaactggtttacaggtgccgcacgactcatctaggaaagaagtatttcggattgggcgtcctgaccacaagtatctctgttctccagtcaagattctggagtaaaagctgtcattgatcagtaaaacagcttagatcggtaatggagaactttttgacataccgcctgaaggtcattcaaactttacggaatgggcaatcgcgatccattaaatgtgtccggtgtagccaaaggagctaaagtatgctcttgccatttctcgataggcatctacgcctatctccgcggctacgtctttatcgagtttgtcaactttaggcagatttccgaaccgctgcatagcgaattcagccaagctctcgtcggtcatcttgacagcgatgacaaatgctgtgagtgcataaagccaaccttggcgagctacttgcatcaacgtcacgatgagcaagcgatgaaagcaggggatatcataaaagttggctaggtcgagagcttcatagaaaccgttggggtgcgcattttgagtgcggaattgtattgcgatctcacgacccggatgagacatgggagggaagctggccggaatttttatatttgtcccttctgaaaccccgatcagacatcgcgaagccttgagactcccattgttttcgatcgcataatcttcctttggatcggttgaaagctccctgttttgtgtgctgtgagttgaaaatgtattcctgaggacagggctgcagcaagcgatcgagtcagcatcggagtcgttcgcaacacttgcgtactgttgttaggtcaatactgtcacgtgactctagacgcgcgcgccctccagtactaggtacttagaggggtaaaatacttagacatatattcatctctcttcttacatacctattgaacttcatcaattttgagagcatcactccagactgggctgagtattagcgtcacggagacgtcattattcaaaagccggtagcgaacatcgaggaagtggatttaccttttcagcagaagctttagagagatttcgatggtcccgtcctgacatatcaactcgactgtccctttgttacgggaagcgacgcgcatccggcaactacaccgccggcttcggcccgcgcgttctcgtcatcgtttctcgtcacgctttctctatcgttatcaccaccatcgacacaacaacgcatattcaatatcaccaccatcggagaacaatagcgatatcgacggatattcaacatcgaccttatgagctcgacaaccgactacatcaaacaaagacacttggctcatcgaacgatgcttcctctgtaatgtacagattcgaaagatgaagtagtcagaatcttgaagacatgctcgtatcgttcgaagagtaaggaggccatcacaggcagagaaagagctatgtcgagaatggcaagtgttataaagtcaaacagaccgagaggaagggggtacggttggtctcaggcatcagcgatagaatgccgacggcacgtgatcagcaatcgtgctgaagagccttttgatatgatgaacggctaaaaaggcgaaaatcgatgagcttcaatcttatattactacctctttggattgcttctcttatttcagtcagttcgttcttggcctcttgacctttgatcgtaagagcagccatcatctgcagcacgatcgtgacctcgactctgcactctgcgcggcatacacgcaaaaagcgcgatcagcatagttcgtaaatgaaaaggtggtcaagcactcgaataccacaatcgcacaaagcggggcgcgacctgctttttttaactctcacactgaccattaagattctctactgtacaaatgagtatcgatcatagcctccaatcgatcaaagcaacgcacttatcctgctagtggcggaaccgttacgtaagcccgggccgaagtaattccctggccgagcgatttcgctgaagcccgcccagccgccggacccattcgcaggaagctccatatacagtagctcgaaggggacgacagcagctattgaaaggtctgagacaatgacacagcggcaaatgaggtgagctagcggtcgagagcctcgtcagagggctagatcgagtgaacgctaaacagatagccatagctatctttgatctgctccgaagggacacccgtaacagtacttccgcacaatacgggttcataaaatggacgacatcagcaaatctcttcagaatatgcagcggtacagcttgaatggaagagggtttggcaggggagaaagggacggctcgacaggcttcaccttgcctagtcagatgagccagatctcgctggacgacccggtggagagcccgatagatatcgccggtcggatccagacgagctatgttggggacaagaggaagtcatacgtcgtcatatctggtggcaccgccgccaacgacttcgtccatgctttcggtacggagtgcgcgttcgtgctgccaggtaagtctacatgctgtggtttccgcacgattcgtatatagcgagctcacgacagtccgcgcatagtcagtgacgatgggggtagcagttccgagatcttacgcgtactaggaggacctgctataggggatatccgatcccgactcattcgactgatcaccacctcgaacaacgaccctttgtctccgggtccgatcggcgaatcgtccaagaacgctcaagcgacccaggcggtgcatgatctttttgctcatcggtttccgaaggagtgctcagagagacaagcaagggagatgtgggcagatctggtggaggggaagagtccactgtggaagaacgtaccgggagacaggagggaatgtatccgatgtgagtcagctgcagccagggtcactgtccgttccctaatgcccgtccgtcttgcacggtccttcacagccttcttcgtccacttcaacaccctcatcctaaaacgatcgcacaagcacttttctttccggaactgctccgtaggcaacgcctttctagctgcagctcgggatatgctaggaggtctaccaggagccatcttcatattccgtgctgtctcggactcacagagctcgggcgccgtgctgcctgtgatcttgaccaatcgtaagtcccgtgcagccagtgacgtgttcgtactcgaaattaacagtctttcaattccgtacagagagaatcacgatcgctgctcgactggtaggcagtctgtacgatcggtcgcggtggtgcgtagctgagtgcactaaatcgcttataggagaatggtttcttgatcactggtcagtgagtggcatcgagatcgtcgatatccggagtgagcgaacagcgactgacgccactcggctgtagatgcgaaatttcacatcccgcccctcctccaagcaagaccgactccggaatgactaccaactcccccttcagccgtaacaagcaccgacggcggaaagattcaatgtccttcgctaccggtgattcgtcatccgaggaggccacctcgacgtcagagtcagagtcggaacccgaaaaggacgatctcgtgcagtattcgtcttcggtcgactctatgacatcgggccaaaggtcaggagcttcgacaccgcgggcgatcgagagacaaggttcaccttggcgagaatctccgttgagcgtggcaatggctgcaggtgaaatccgtttgaggagtaaaagatccaaactggccttgttcaagcgggagaaaacaatacaagagaacgggagcgagcaagattcggtggaccgcaactcgctttacacaaagggagccgaggaggtccctcttccatctcggattgaacgtgagtcacaatgagctcaccttaaacctttttcgtttgctaaacgtccttgcctatcgtcaggcgtcttttacattaacgactatggacaggagattaagcctgaccccaactccgaaatgcttcagcacctcgcttataaggacgtgctcgtctatagctgtggtagcttgtggacgagtatcgtcccttgtctggcactcaagggaatcgcttcggcaatcgcaaaatcgaaatgtttgaaggcaaaggtcttactacgtgagccgtccgcagccacgtatgacggcgtccaaatccagctcgaacgctcataaccatagccccgatcagtaaattcgaaaaacgaccgagagaccgacggctatactgctatggattacgttgacaccatcgttcgcaccctgaacggcgctaatcggtcgaagaaatcttcaaccgagtcacccaccatctcttcatcgagcaggacaaagcgagaatacggcccagcgagattgatcagtcatgttgtctacctggaaagtggcaaggttcacgttgacgtcgatcgattgaaggtcagtaggccggataatatcggttgacagcaaggctgaaatcgcggtctcgcctgcgtcaggctatgggcatcacttcgattcgagttccagcaaacgccggaagcaagttcacaactcgaacagtttcctgggcaatgcagcagatatgagctggaggtcgggttgacagtgagcaaaataatgttactgatcgtgatgagatccttacgtcgagtcaaccgtgcgggttatcgaaacgtccccagttgcgttcacctcggatcacgattttgtattactactcgcttcggggcggtgcgatcttgtgtcacatgggcgctcgggaccgtgttaggcgatccatcaagtcatgaacatattgattcgctgttctcaccctgcaataaccgcaatcggcctcggtcaattcttcctcgtttgggacgttaccgactcgcgaacaaggtttcaccggagtggcgcatgggccgggtaggctgggtatgctgtgcctggattcgtcggcccttctctaggttcccatatatataggagaacaagggagagatggccggaatgccttcgctattcatcaggactagagtgatctaggtagccaagatgatcttgaccttaacatccctggtgtcgatcactgccttgagcctaggaacatcagtttctgctcgtcgtcacaaagctcgcaatgagactgctttcgactgctacccagcgggatgggtccgggcgcctgatctttacccaggactttcgaccccggccgatgctcgtttgtacctcaatgggacagaatgcgaccaggttatcaagtgggaagtaggcctgcgatttaaagagcgggccatcttgaagtttgcgtgagtctgagcaagtgctcgtgccaggtactttcgcacgccaaactgaacacaaggtatgtccagcgctggcaatgtgactttgccggagcggccagtatggaacgagtctctagtcatggaggaacaggaggtagaggacgactctagtctggcccctatccttggagacggatactggggatcatcgagcaggaatcaagacccttatcgaagctgatggaagaatacggcaagtcgggttgatgtgtccccgatctatgcgcttgttctgactagcggctattacttaacatggccgacagaggagaagaagaaagataagaatctctgggtcattcgggccgttgagagggatgtctttgacacgagattggaacttgagttgcgtgatggctcagcgaacagtaagtcccgcgtgataatgatcgacctgacctaatcgctgatcacgcccgcgcagctacgatcgtcaaggactacaacttctatgctgtgcggagctttaacgtccacgtgcctcgtaccaacgtaagtaaatatgttcaatgaccaataccgcaactgtgactcaacgtttacgacgcaatcagtacccggcccaactccgggatggagtggtttattacgggggtatggatgacaatgacgtgagtcccgaactgagacgctgtacagtacggcgtccaactctttccattttcgcttcaaagctctcgcacgtagaaaccatgttcgaatattacttcctgttgaccaaggcggatggagatgagctggacgtcatcgctgggcagagcggtttccttcccgctggtcccacaccaattgtttccgacgatgtacagaaggaggtgacactggcaaggccggagaatgagaaaccggttgacttgcctgacggttatgatgcagggccctggttgccgtcatgtgtaaggctagctcccgcttcatgcatctcggccttagagtctactgatagccgctcaatcgacaacacaggacgtagggagtgatgccaacttcaccgttagcctctcgattcctaaccagggacagctcacatccagtaagccaaatcagtctatccgcatagacagaatgctcaatcgttcctgcccccacgacaaagatgagacgcattccgttcagctcacgattgaaaaggttggaaacggaactgaatacccggctgctgtgaggctcgaattagcttggtgccgaaatgatacatgggctatgggctacgctcgaaatgattcccaatttaaggctgcagatcgctgctcttctgctttgcggaatgatgccggtcatttcgaccaatgggataacggccctggccgaaccctggcaaggattcaacgacctatggagcggatctgcggcccggaccccgagacgtcgacaacagatgaggacgaggacggcatgtccggaatgatatggtccatgggtcgtcatcagcgttctcctgtcaaaaagctagaccggaactcttggcaattacccgtcaccgtcgatctcaacgtgtgagttaggggatgaagccgttctcaaggtggcgttggtagactcatgcccctaacgatttcgatacaggtttctcaatgtcactccaagcttccaagctacctttttcgatctaaacaacctgctcaaggtgcatctcgacactcggttcgcttgtgaagaagaatcgcccagaccttccacccagactgagcatgacctgacagacaacgaagcatgggtaggagaataccggcgtcaccgagccaagacccagggcaaacgccgaacccataccggacgggtcccggtcaacgtcaatgcacttcaactcggaactcccggacccgtcaagtcatactctgacccagaagtgcacggtatcgtcatcagtgccgtttcgacccataccggctccttccccttggtaaatcatacctggcagaccgagttcgcggacagggatttgatcaagcacaagtggcacccagtgtgggatagacaggtcctatgcgaagggaatcggtactgcgagcggggcggggccaccgagaccgtcagtgacgcatgggcgaagaaggattgtcccaagttctgggccagacagagatcgacgcctgatagcctcggtatgaccaggactgtgccggaacggcagcaagcgttcaacgcttgacaatgctgccaagagcgagtgattacagatcagaagcccggcaagtaggcgcgataggtctgaagactagcgcaaagcgggccgcgaaagactgcagcaaacgaaagggccaaagtatatgtatatgtagtgcgtcgtgaaggcgggtcttgatgtcctgatgctaccgcaacaatcccgacatggccaagtttcaccagaagttttctgtggcctattattatcgttactcatttctgttagatttggccggaacaggtcgcgggagtcttgacgggagccttatgttgccttcctccgtaaacatgtgacacaatctcaagtggggtctatgacctggtaatgatttgatgcgcgatgtacagagggtgacgtaagcccgggtagacaaacgcattatccgcggccatgtcctctggttctatttgggagtttttgctcggtatacgccatcatctgactcgcgggcactttttcgaatagaaacataatcgctccgccgatcgcctcgaggtcaatcgagggtactgcccaatacacaaaaggatcttctgaatatcaacgtgtcaccgagtgcgggaaatacctctagtcggccggcccgatgtatcgcggcgagatcacgggacaagtctgaaacgcgatcgattccacgcggacagcaagttgctaaaggaggaccaagcgcgtagaatgtcgatcaacgccttcctttgaaggaaggttctcctcgtttcaatgagaaaggacgatctaaacaaaaacaaaacaaacaccgcgcatggtgtcaccgctatctgccatccgtatgatgattcaaaggagctttgcgattgtcttttcacctttcacaaggcgaaccatacctcgatccttacagacgataaggaaacgtgcgtctacactgcggttgcgcaatcgatatttgttctccaataacaaccaaagtgccggtcccgtcgttataatccaacaccttgtctttgaccagtattcaaatcgccaaacagcaaccatcatatccatcataccactataccgtatctctaatcaatcactggacgtcaccgcttcgccactcacgacaacccttacgttgcaaactgaccaccgggagaactttttatcttcagtccccgaggattcgaagcgggaaccaaccctttcagcatgtcgtccaaccctgtcatcatccacggtcacgatggttaccgagacccagcgatcgtcatcggtgagtatcaagacgactggcagctcgctttccccgaggggactgactcggtttcccgctcacgctcctctcaggtcctttcaagccatcgtgcgttcagcagtagctctgggtctccaccattgtgctaacagctaccgaatttgccggagcaaatagccgaccgggatatggaccagtcctctcgtatttgcaagcggctcagctgcaggaccctctcatcattcaccgtaagcatgtatagacctcggctagtgctagtgaagtttggaggcgggatactgatggtatctgatatgagcttagctctgcttaatttgcaaggatgggaccgaaaaccttacccgaaggtgagtcgcgatgccgcctcccctcgccttcttgcctttctacacgctgacaatgtttggcgtcatgacgtctgcgtatagtatctagcgtacaacgtcacagaacaccctcaatttgcagctatctgggtggattacgatgataccgaaaccgaatgtgagtcgtactcccaatgcaacccctgccttcaccgctattagaatgttccatccgggtcgagcgcaagctaaaggaaggtttttgtctacttgatagggattaaagaacgtggtcaacctgcgacttctccgatcgttgaggagctcaatttgggtcacgtagagacgggttggtgcgtacggtgagtcgctatccactaaagccccaaatcagcatgcgactgaatcgatgtcgtacaattgcgacagagtgagaaacaggatggggatcacttgcgaggacgtcttgttcgcgatcttcgactttttcgcttcaccgtgggtcatgccgttgttactatggtggtttcatagagactgatagcagatggctggtgtgtcggggcatagactatatgttgatgaattaggagaaatgcatccccgtgcagtgaggatgtgagtccgaagccctcgaagccgtgtcgtgtgccaatagctgatgttctcacttatattcggctagtatggagcaacaattgtgagcgaaacaggccgtccttctcagctttaacccgagactccatagcttactaaggctggatgaacagcttcgagaagcgccggctgggcttcttcgatgggggaattgaggggtaccggaaggtaggtctatgatccagtccttgtcgacgtcccagtctactgccgccattgatgcactgcgatcgtaccctaggcggacgcattattgggaaaagtctacttcaatgggcaagtcgacaaaacaagcttggcgaaaagctttttctaaccgggtactcgtttttacacgttgacttctggatgcatagcctgtataacggtaagtatgatacacctgtcccgatcgtatcacgatgaccgatgtgcgacaaccattaccatagatgaatacgctcgacagctgctgaagaagaagtacaactacaatgcctcgaacctcctcttacttgagctcggtcagtgatttggcgtacgcaaatcgtcttctgtagaccgccaagctcattcgactctcacataggtacctgttgattgggcatatcgaagaacttccatacatggagatcccgttgtatcactaggacgcgcgttgtacgtcatgcatgttctccttggttattcgagtcgacgactctcagcgtaatggtatcgcaactacattataagtccgttcgactagtcatacaacgctattgtccctaccggacccaatccttcgctttcaacagtcccacaaactcggtcattgtcgtcaatttcgatacgcctgacgacgtcgcggctgtcctcttctgccgtgtccttggtcgcatcgatggccgtatcaatgcttgttgcagcaaggattcgaactgaaccaacagctcgtaatactccgcattttcagacgccgccattgagacggtcaactttcttgcggtacctttgattgccggctttgatcgcggcttcttcagactccgcgtcgagtgcaagagtacccgtgtgacatgtcgcaaccacatcaagttggtctggggtaaatgtcccgcccaattcccgtccgcctcgtcgtcaaccagatcccggatagctcgatacacgtcccactgatcgccctcgccgctgaaaacgtcttcgggaataggtgtgaagtagggctctcccgcatcaggatggtccactcgtgacagaccaaaatcgaccagggtagccttgaaaccgaagaagctggggtttgaggcgtcagcagggtcctgagttgcggcctcgaccggtcgaaggagcacctgtccctcgtgaagatctcgatgctgcgtcgacatcattgcgtcagtgcctacttagtcaccagtccttctcgcaaacaccggctctcacctcgaatctggccttgacttccccttctgccaaggtcttagtcacctgcatgacggctccccaagcttgtttccaaccgatcgtcttgtcgaattcaaacgactccagatccatcccggcgttttctagcacgattaaagcgtacaactgcgtatccgggaggtctcctgctcagcgtcattacaaaaaggatcagcacaaaccaagatgagggatttccggaggaacaaggctcacctggtcgaacgctgtcagaccctcgttgctcttcaaactcatcccaggcgtcaagcaaggcttcagggtaatttcctttcacgacatacgccctgtaaacccagatcgaacacgattttcgatatcagtaaacctacatgaatggccaggcatcggaagactcacccgtgacactgaacgaatccttctcccatcccgctcatgagccgggtgatctctatctcccttgtaacatccactacgagagagcaagccacctcgtcgtcctcttcgtcgccttcaattcgcgtctccggcttggacgggctcgcctcctcggtgagcggaatgaccttcaagaccagccccgtctccctcatagacaaagaggtggcctgcttcttcttccctccacgggccttgagctttgatttgcccttgctagcttcatcgttgagaatcaaagcgtacacctcggaataactcgcctcgccgacctttcggaaggcgttcgagcctgtcttcctggtttccacgtccagcgcgaaatcgtgctcgacgaggaatgacgagaaatccggggcggacggttggtcacacaatctgaggagcgcttcgagtgggctgtcgggcagggctagattcagggtggctagcttttccgaggccaatcgaatcgggtcaaccagcacatcctctcccactggggatggagacctgaacggcggagactttctctgggggaggacgacgatcatgtcttcttcctccttttcatcctgctcctcctcgattccctggacagatccacatcgcctgctagactcgggcgagacgaccaccattctccccctccccgccctcgtcttcagtctcttctgttttgtcgttccaacgccggaggatcccgacgaggtcagactggaccgggaagcatgaggcttgttcttcctagttcgacgttttggaacgggtatgatgtcgtcctcgtcctcgtcctccatctggacgtcgtctttctgcacatccggcgattttgacgaggaaggtgaatcgataacgagatcccgcacactgtcattgacattgacgaggagggtggacatcgagccgacctgcaccggccgtacggtcgtcgttcccgacatttcgacctcggtattctcgtcgacaagatgaaactcgggagcatcatcgaaccgcccgctcgagatctttaacgatctcagatcgatattcagatccacttccaattgtgaccccgcctcctgttccagaagcggcatttcgcctgatgtggtgttcgtgcccagaacacgctgcgtcctcgtccgcatcgaccgccgagggatttgagccctttcctcgccctcatcttgctggtagtgatcatcatcctcgtcatcaacaaacagatcgtccttgcccgggctgaacactgatccggagctcgtcgagatggaggagattgaggagacggccgagacgaatgagccggtcgagctggacgagacgggggcttccgagcggatgcctctggccgcttgatcatgagtgcgagttcgtttcttctcgaaagtaggagccaggacgaggggtcgtttcgcgggttgttgtgtcgactttgttgctcgtgctgtacgagatttagccgtaggagtgatcggagggaaaggtttggtcgtcttgcttccctgtttgcagtctttgggtttggaggcggcgcggttgttgaggttgatttgagaaagtggagcgggtcgcgctcgaacggtcgatctcagtgggacgatatcctcctcgtcttcctcgacgtctcgctcagagtcttcatccggagcctctgattcgccccctcgggcccctggttggcggttacggatgggcgaatggtatttggtaggcgagatggctaggtcgaagaatttctggtcgttaacgattcgctacaataaccaagagattgaaaaggaaggtgatccgtggttcagctcaagatctggcggttcatcgccatacggctttgatcaacagagggagtctcgactaaccgtctttgatttgccgtaagtccgcactttgcgagtatgcgcggtcaacatggtggtgtatcttgctctacttgatcttgaaccggcaatctggtatgttgggctggattcgtaggtaatacggttcgaggtatagacaaaggtcaagatttatgaacatgacgatatggatgatgcgatgttgatgtaatgtgatgtggtttgttttgtttgttcaagtagattctactcgaaccatcccaattctcagaataataacgtaatatcacgtgatcactacagaggagacacagtccagtagctagtagcagtagttggtcgccaatcgtcaacaaaccgtatgacatcgaggtcatttgggctgctgctttactagaccacctcgcagctatacaagccacctcgattaaagcaaggagcaacagcaagacctggcacggtactcagcagtactcgcgccaaccgaagcgcaaagggtcagcccgacgacccacctatccatctcaccttgactcgcatcacaggacgaccccgctccccgaccatgttcgccccgcaaacttcctacacgccctacaccttcaagctccaggggacgatcgacagtcaagccgattctgccctttcaggcttggaggacctcttgcaggtcaaagggtacgattggttggaagattacatggctaatgtcgagagggtggccaaggccggaagggccggtgcaaggttagtcatatttcgacctttatcgcggaccataggctataccgactgaactccgatattcttcactttttgtcctggggtttccttacttcctcgaacgctctgaccgcgggatgcgtgatctacaccttgctcatcgacttgacgaggcacgtctatcagcggcaacctagcccaagtcctcaagactccctctcgaaccccacggacggttcctaaaacccggacggggctcgccaaggagaaacagagggaagataaagtccggctagcgaatgcgaatgcccaatcggatctcgatttgatgggtcggggtgaggaagacacggccaggaaagcgagggtgagtctcctcgtctgcagggtagaatagtcatctccgagatacatcgagtcgtatactaatcgtcatccgtttcttggcagcccatcggcaagactctcctctttgcacctcttgcaaccgcatcgcctgcctcctcgccctcgcctacaagaatcaagcagaccggtgcttcatcctccaagcctgcctccaccttgtctaaagcttctatacccaaggctaccttgtcgtcgtcaaacccgttcttggtagaggaagacgagatcgttgtacatgccatcaagtccggtcaggttgaccctgatgtggagaaagacgaggaggaagaacgcccccaagaaccggttcttcgttcgtctgctgccgtctcaaaagcggtccatgagaacccggaaggagacgaagagcacaagaagaatggcgtccgtgaggcggaggtcaaggaggagatggagatggaaaatatcgctcagggtctgggcgaggttacgctcaggagtcctgcaaaggtcgaccaggaaccagcaaggcaaaccagcatgcaggtcgatatcccggtgcattctcagactgtctccgcacatgtgtcgacgacgatccagatgcccagcgctgttgagaacgcctcgacggttcttcccgtatcagatgcatctggggacgtcgaggagaagaagaggcaaaccgagttcatgatccctttgagagattcgatcaccccggtcaaatctacgactgccaccacggcaaggaaatcgacgtatggaaccgagagacagacacccatctccttttctccgtcatccgttgccttcgccgctttgccctcgagaggtccttcgaggggtaagagcgtcggaggtcagaagcggatgacgctcaaggcgtccgaggcgcccgagcaggtacatcaaccgtacccacaggaagacgtgaaagaggatctagaggacaagtcccgaatgccagcggtggggatcgtcaagtcggtcaggcttgcgccagcctcgtctgcacgtcaggtcgacccggggcccgtctccgcgcccgcggccacgcccgcccaggtctcgagacatacttcgggtcaagatcggggtcaacaagccgggcccgcttctcaagggaataataacaagaagagcggccctggtgtacggagcagttggttgagacaggccatggcgaatgccggtggcgagcaaggcgtcaggaagagtatggccgggaatgccttaaggaagaagagcgagtttgacaaggatgtcgaggaggaagaagaagagaacaaagaagaagaggaggaggaggaagaggaggaagaggaggaagaagtggtccaccaggctgtgcttcttgaggacgagccggctttgaagggcaaaacgcatgcgacctccgacattgcacaggtctcgggagaggtcgcctcgactgttttggaccaggcgcatgcagccgagagcaaaacctctaccaaatccactcgggacatcaagctcgtggagaggcaacctctcgaaccgattaacctgtcgagacagttgaatcaatccgccctcgatctgcctctcgcggtcgagacgatgccgcagagtaagctcgcgaagatgatcgccgatctggaggagaaaaaggcagcggcctcgctagccgcttcagcttcccgaatgacgctcgggggacagtctttgagcggtcagcatgggatccttggcggaggaaccggatggaacccgttgagaaacaccctgggaggactgaggttgcgagacgaagccggcgggactccaaaggatgagaacggaccgatcagtcttttgcctcgacaggacgtcatccagagcgatatcaatgaagatgtggaggcagacgaggcggacgagcaggaaggtttcagcaagagaaaggccactgctgtcgtcgtcgaggctgtcgttgagagcgatgtccaaaccgagaagatcgaagtcgacctgaagaagactgcaagtgaaacgaacgaggtcactatcgaggtgcacagccaaaccgtggttgaggcagttgaagacggagttgtcgagagtcagcaacggtcgtcttatgtggtatcgacgacacccacggaaccgatttacccggatattggacagcttcccggagctgctgtgcagctcgacaacgagaagccgagtaatcagaacgacgtactcacgcaaagactcagtggcatgatcccggactcgatcgactctgcacctacagtcccaagtgatcaccaggccttttctacccctgtcaaaaaggataaacaggacactcgcattatcgagtctacgacaccgatggtctctcctccccgcgcgtttagaccgggcgctttcgctcttcatcaagttcgtggaccttctcaactgcaaaatgtagctgggccgcctgctgctcggccacccaagctttcgatgttacgagtggattctgccgaagaaattagggtagctgacgagatactgtcgaaggaagcgcccaccccattcgccgatatcctccccaaggcaaagttttcctcaactcgagcgcaaacgccgcctctgccaacttcaagcgaggttacatcggtgaaacccgcggtcccggcacgggctcccccaacagatcccgccgccacgacgatactgccagctccagcgggtctttccgtgtccactgcccaggttattcctgacgataccgatgacgaccatgacgagctcgagtcatccgaagaagaggaggatcacgaagaggcagaggaatccaaggaggacatcgaagaggcagtggcacttttgacgaaagacatgcggttcggcgaggacgaggcggagaatgactccgaggcgccttctgacgcagagacggtgaccgagaaagccggtgcaggtggcaaggtaagtagaagggaaaccatctaagaaagcaaagggtattgatgcaacagctcatgcgaattgtagggctcaggcgcgtcgtctttggcctcgtccaagctgggatcctctacgacttcgaagatgaccgctcagaaaaatctgactctggcttctagcatcgcaagaaagatcgatggccaacgaccggtaatcggccagattgatagcctgatgaaggcccagcaggctcgggaaaaggcgagttgcattcggccacgttcgctccaaccgaacactaacgctcttcccgaatcatttaggaggcggcgatgacggcgaatcgagctgccaagcaagaagcgagagatcaacgaaaacgggacgagatgcgagaacgagctgctcgagagaaagcggagcaagaagccgaacgtaaagagaaactcattcgacaagaacgcctgaagaagctccgtgacgagcaagacaggaaacgaaaagaggcctacgagaggggtatcgcagagaaggaaaaggcggcactagcggccagccaaaagaaggccaaggtgcgcaaattttgcaccatcatccagggtcgtcctttgacattaacgcgtgccgcacttgacagctggcaagcgcgccgaaagaagtcaagcgacctgctcagattcatgccaagcctcgggaacccgctggcaaacccatggtccccgaactcaataagagcaccgcaccgactcgacctcatccgatcatgaagactatcatcccaaccggacctcttgttccgaccgcttcgaccatgcccatgtctaccaacgcatcgagttccactgcaggtccttctcgaccactcggagcgcccagtaaacccagcttggccaacgccggccctgttcgaccagccaaggcctccatgcaggcgggcctacagcgaccgattctgaacagcaataatcagcagaaccacccggggatgaggaattcgacgattgtccccgttggtggtgatcgaaagacagtcacccctgctcaggctggaggggtgttcgcggtcggacagtcagccgtcgtaacaattggaaagacgggcatcgtcagtggggaacaggatacccgagcggaggatatcgaactacctgatatcgattcagagtgagtccgcacagtctgagtatcggaaataggaccactgaccgacatctttttatctttgaccacgtagctatggcatggaatccgaatccgatgatgatgccgcctcatggaccgcctcgcctgccattcgccgagctatcgacatgcaaagcgccgtcgatccggctcatttgttcggacccttgcccgaattcaagatggaagacgtctttctcggtgctcgatcggcgaaacgaccgaggagcagcagtgctaattggagcggggcagacaggctgaccgagcaggaaaaactcgagtacgccaagaggatgaattatcgagacgactcagcgttggtctggtagtcctcattggaaggcgggtatgtagatgggttgacccgagaaggcgtatatttttcgatattgtaaatgtgagccagcgagcccgcttggataagtacagactcatatgtaggaaatcctgcgcccattcctattcatcgtcataaaccttgacgatacgatttcaaagcgtggcagatatactcgggcctgccacgattccgccgtcagtcaccagagataatccgcagaaccgagaacaacctccgggtagataagattaagtttgttattgtgcctgcgggtgcgacatcaccatcgtcacgggctcgcgcgctaaggagttctctgacgtaaggacgcgacgagaacgcgttggaggtggaaggatcaaaaagctgtgcagagcgattgaggagggacggtcggatgggtctcaaagtgaaaacagttcggcttcttggaccgttgtattttcggtcaaacaacggctgtgtgggatggtgggatacgctgcgagagggcaaggctacaactaattgaattcgatgcatgactagcggagagatcgataggccgagcatgacgtgatgatgttatcaaccaggcttttctggctcgtctggattgcttcctctttgggccgacgcgagcgtgactcagcgatttccgcgaactgatcgacgaggtcgtcaacgcgacctgggtgagcaaaacaaacaatcgcggcaacggcctgccacagacggtctacaaaagactcgaaatcgacgcatatttgccaagctgggaatcttcgtgaatggccataggattccaccttctcttctgccttcgccagaaccgtaccttgaaatccgtgtatttcgtgtgtatgggaattctcgcgatcagaaccacgatcctgaccgggtgcggtttttctctttttgcttccttgcctctttcggatgatcccttggtcgtcgagacgcgttctcgcttgagaagttgatacgcgaagcatcagcagcagcagcacatgcaccagagccagggccaaccaccaccaccactaacaacacagttgccttcttgctcggaactttacaacaataccccatcacaccctaatacattgctctcccctgccccgttcacgaaacgacatctgcgccaccttaccatcctatcgacttgttctttcctcgttactaggaacgccgacgacaagaagcatagctcaatcccggaccgcgactgatagcagaaatctcacgaggcaccggtcttgcctcttgttcgctttatcgcttctagacactcacgtcagccaggaatctgcaaccagatcacatcagctcctcgaatttcgtctgagccaagcttcgagtcggataaccatcgcccgacgttagcagtaaacgagacggacaagaagcatcggacgcgaccgaagactgtttagacccagaactacgaatatggctctagaaccgacgcgatacaggtcgacgccttctcccgagcttggacgcagctgcatgtgtggccgcaacgtcgagatggacgacatattttgctcgactggtgagtgtttggcgccgagaacgcttcgcctgtcggacgcacatattctgatcgcgatcctttcggtagcttgtgcgagaaccgacgcaatgtccgcattgtgcttcaacgatgtttctcgccggacttcggaacaatctctatctgccatcttggaagttgctcccaacccgaccggcgtcagcaacgatgatcaacaccaatacccatcctgttcgcgatcctccccaccattgtcttcgtccagctcgtccgaccgcttcgccgacgcgccgttcgattacagcgcgcacggcaactcgtccaagttcacattccccatcacggcctcgctgcacgaatccgtctcgcacccctatgcgcacgccaatgtcgaatggagcgcttctcactaccgacgacaggcgttggaggagatgatgaaggaggagaggaggaggaggcgacaggatcgagcgggccatgcggattccatgggcagcatcgcgagctcctccacctcggcgagcatcagcggagcaggcagaatcccggaattgattggcggtgccaagggggacgcgcacgggaggaacgagagctgggcatcgaccgtctctggtagctcgatctccacgacggccggcccaagccaatctgacgcgaggcctaggtttgagaacggggccaaggaggaaaaacaagaattcttgctcggacccgagatcacctctacccagaagaagctcgggtacggattttcgggtggcgatcaactggacatgaatgccttttcgctggaaacgtacgacaagcaaggagtacccggatcgagtgggcccagacgattcaagttgggaatgaggaatcgatcgacgtcggacggtacgacattgatcgctcaacacgaacagggcaacgtcgctcagatgcccggaccgaattctgtcggaaaggcgcgcaagacgagacgaccctccttcgtgctccgcgaagtatccagtcagtctggttctgccgccgggtcgatcgggaacgacatgaaggacgttctcgatgagattatcaggatggaaaaggggttctcgctggagagtgacagggaggtcagcgaagaggagaaggatcctctatacggaaggacgagcgtcaagccgaacaggtactcgggtctgggcgtagtaggcaggatggacgagattccggcgactcccatggctggagtagaaagggccagggagttgactctacagcctcctcctgcgcccaaggcggccggagcgtacactatcgacgatacgcctttgccttcgacgagaccgatttcgatctcgacgaaacatttggcgacgactccatctcatcagctaggccatttgccctcgcgctcgctcaactcgcttttgttgcctcccaaagactacccagagggcaactgggagctttctccaggaagtggacacccgacaaaggtccggtctcgacccacgagcgtgtctgtagcgggtaaccaccgtcatctgcgtggtctgtccagcggtcaggacgtcttggacgccatgatggggggtcaggaagaggatgtcgtgaccgatctcgtcagcggaggcgggctaggcaaggagaaacgaatgtcgaggatgtcaagagagtttagcccggaatcccaagctcgggggcacaagattcgacggagtctcacctttgagaacacgcccacgggtccaaggttcccaagcggtgtgatcctcggatccggtggaaccacgcccaagggtatggggatgagcttggacacgccgccttccgcctgggattcgagcatgtcctcttcgcgtcgagctcgagggaagaaagtgctcgacgactcggtgaccaggtttcagttccccttgcgcctcgatactgaaatgagtgcggacattggacatgtcggacgacccgagatcaagattgacggcatatcgtgcgggacaacgggattcctcgccgcggcccatcacctagacacgagtgacctactcactccgactcaggctcattttgaaggtgccggtagcgactatctgacaccttcgaaccgctcgtccgcgatcaacgctcatcctgtcgggtctcttgagccttcgctcttccctcccactccgggcaaggcttttgctcctgctggacaggatcagacggtactcgggtcggggatcactttcggagggctgctgaagactggaacaaatgacgaccaggacatggagctctaagcataacgatactctaccagcaccatgtccgtcccggcttacgaccacggcggacctaagatcatatggatcgaatccggcttgacacaaacacatacatatacaggttttccagggcggaaacccatctttggagcatcttgacgaccgaatcaatcttggcgcggacacgcgcaacaacaacaatgaacgaaggatatatcggggatccgagcgatgatatttgaatgacttgaattatttctcggaattgtagaatctagatattttgctcgagttcttgatgatttgatagatcagtttgtaaatcgccggcggattcagattctcggaagcaatttccccgggccgtaccggaatagaaagttagaaagtagagctgactacagtattttgtggatttcgttctgctcagtcatatcccgattgacgttttctcacaccagcttcgcagccgacatgcctcatgctgatgcggcctttgtgcccgatgacattacgacgtgagggatccggaccggagctacctgctgcgtcgtgccaggctgatcaaaagctgttgcacatatcttcaagtaaatcagcgttttatgcccatgttgaggaatcgattgcggccttgatagacgggcaagactactgggtgagtgcgcagataccttgtcggtgggtatgatccctgagcagctttataaataaggtctcgaactttgcgaacgcgagctcggttctgtacaattcgtatttgggctctgacctctacgggcggagagaggatggcgaacccgtcgtaaactggtgtggtgagccatcgtaacaagataagaatccttctcttcgactgaactcttgatactgctcaggcttttacgtacaccctcctgagcaatctcgctcgggtccactactccttggtcccttctgcggacggcccgcctgtcaggtaatccagaccaaaccaggaaagggagtctgcgcggatagtttcttgaagaatgagaccttggtcgtcggggacgtacacgcttatccaggtcatatcggtcagtaccatgtcgcgccttagcggaagttgtaattgaccagggcttgtctgcctcagcttgtgacgctttgtcccaatcagaaatcgttttgcctctcagaagccataaggacggagctaccgtcggtgttctcgacttggacagcacagtgaagaatacctttgacgacgaggacaaacggggcctagagcggatagtggccctgctcaagatttgagctgtatgggctgataaacatatatcatgtcattgtggagacgaaatccggtatcggtgaggacacaccttcttacattcttgtcttccgagcggtgtgcagccgacgaattctaagtatgggcatcgggaatacattgggatttccgaggctgacggatcatggcgcctcggaagagcgatcgctcgccataagatccccggcagtgatgatggccatggtttttcggttagacagactggctgtaactgaggctcagtgtcgccccatgtctcagcctggttgtcagtcgtgagggtttgagtgatagtgaggatcgaaggatgcttttgctttgcacgacgaagcgcaaggtaggctagctgaacgtttgacggcttcgcccctcagctattgccaggctgtccaacgcatcgtgatgatcgcataaaaggcacctacacgctagatcgccatctataatgtctgaatcctatcgatacagtgagtgcgaaatgtcccttcaatccacctgttctctgctctatcgtttggccacaggctcatcacaataaaacgctattaaaacagccctagcacaccgactgccagcagcaatgtgcaaggaatggaggccaatgacgaccaggtgatctgctgagccggacttgtagcagatggcgaagcggctgtcgaagatcccgcaccagtggcagaacccatacccgtcgccgaggctcctgccgatgtagtggtcgcttcgccgaccggggccaaggcactccagttgaagttggggccgtaagggtattcgtccaactccggcatgttcatcaccccgaaacatgtgaggccgccagcagtcccgttcaaaaagtcggacatgttgtcgatcgtaacgttggtcgtattggtcgtcatatccatgaggaagggcgtgggttcgtgaggtgtatcagccccggtcgtacaattctcagcatactttccggcctatctccgaaacataccaggtcagttggccgagacgtactgtctcacataatatactgctgacttacgaatgaagtattgccccatacagtgttgttttcgagggcaaaattccgggctccagcgatagcaacagcaaagaccattgcacccgaatagacgttgttggcgatcgtagcgggacccgccgaagtgttcgtaccgtatcgctcgctaagattgaaatctcaacatcagtctgaacttgagctaagtggacagcgaaacgactcactctccccaccagacaagaggaccgatggccatcccgatcttgacgacggccgttttgttcttgataccgaggctattgttgccatactgaggaatggcgagtggagtgagtggcgtagtgaggctcgcacggtcatgtcagcatacctgatcagcaaagcctccgtagatccggttgtcctcgacgagcaagtttgaaaagtttcctttccaagggtcaaagtcgaccactaaaagcgaagtcagactttagcgatagagtcgcggctagattggttaccagatagatttactgttgattccacctagcatgaccctctatagttcagatcgaagcccatcagcaaacgaatttcgctgccggtggtatgcgcagatgaaccactcacatcggtggccgctatggtgttattgcggatcgtactccctggcgacccaaagacgactattccagcatccgtcgcatccttgatggaattgtcttcgaccagcgaattggcacaagataaggatacgccgtctgcccactgtgtgagattgagatcgcatcaagtcagaatggtcatgtctttccccttcatgcgctggttacggtaccgaggagactcacatattgaaagtaatccgaaccgcacgggccgatatcattgccccggatggtggcgttggaacaagcgaacggtccttcggcactgcgagtaagggattcgtatgatcagctagaatccgcagtgttatcggggcatgcaccgactcacatgtgcaagcaagaccatcctctaatgcgcaggaaaaaggtagtacgatgagctctttcctctcctcttcacatccatactctggtcgatggctgacctgggattgaaactcctgacattctgtacgatctgcccttcgttcgcgccgccgatttcgatgttcccaccgccgggcaaaggagggttctcgcccctgttcccatcgatctggatgttcatgatccgggtaaaagagcaatttccgcaatctccctggatggcggtggtatgattgacttgggccgtcttgggtccatcgaccacgagaacggctcgggaggaatcggtcgggtagccttccgtgctgatttcctgcgagtgcaggggttgtatcgtatgcccagcatcagctcacacgtcgatgcgttcgaaaagatgctctttcagctcacctgataagggtcagtaaattttaacgactgggtgatggagtaaacttggcctgcacagaggctcaaggtgtatccttctcccccatcagtaaggagtttctgcaaccctgcagtgttcgtcgagttttctacacaggctgatcgtgctaggctagccgccaaccatatggtcacaacgagtgaccatggaccggttttctggggatgaggactgaacatctttgtttgcggatggtatgctgctcttgcagattgtactggtgttccttggactatctcgtgacgattgacgtttcacaatcgtgttccacgacctttcgatgtcgtttctcaggccaaatgctacagtcgtatgccaacgcaacaaattccaagtcgatgcggtctctataatcgatcttttcagataagcctaggaaccttgaccaaaaaaatagatgctccatcatccacacgcatgtatctaccttgcacttgtatagattctgctgtgccagagtggtttgtctgctctttttccgcgcgctaatcgaatcgataacaaaaacaattgtgatcgaggtcaaaaataaacaacaagccctcccggtcaagatgcgaattgtgtttgatgtgatatcgtaaaagagcatactcgctcaaagatacagagacggtacggtcggcccgtcatccggctcgacgacctgatcgtgaattagcctcccacccgcaaagaccgccctcgtctctcgggtgatgagacgtatattatgcgtacaactgatgtgcctcttcccccccccccccccccccccccccccccccccgcctcgtatgctcgaacggcgtcggcctaggctccggctcttcgggccatctccatgaccttccatccacccgtctcggtattgtccagctcggactcttccaatgtcaacacggccgcgtagacgacggattccacgccgtctggtcgaccgacgacgaccttgccatccttggcggatcggaagaggaggatctcttgcgtagcaaaggtgacgaggaagacggggacgtcgttttcaagcacctttcctgtagagacctacggggtacgcaaagcaagggtaacggtcagcacaggaaagtagcgtgtcgaaccgtgcaagacgtttgtatagactcacgtcgacgctgcggatatccagcacgcggctatccgagacgagtccctgtttgaggtactgctccatggtagcccacaacatgttgtaagtctgccgaggcaaaaatccagtatcagctaccgtcgacgccagcgaacacgcatgtcgacctcgcgcatcgactcacagcctctccacaccacatcttcaagctttccttgtccgcgttcaagtacgcatccacgacctcgggcacgatgtactctctcaactctctctggaacgcctccatttggaaatccggatccaaagccctgatcatcctgatgaccctggccgtctcgttctcctcgaaccacccgccgacggtggtcgtcacgctcctcagggtcgagacgacagggttctcggactcgtaataattttcctgccatcgctggtaagcctcgctacgcttgagacgctgggaccaggtatcctcgggttcctgtgtagaggagaggacgagcgcttcccccgcctcggggttggcctctacccgtttcctcttgcccatcagaccggcctttctcaatcgttcttcccttcgcttccttcggacctccctgtcctcgtacccgccgtaccgggaactctcctcgaaagcctcgaccacgctctcgctcaacgccttgtacgccgccgtgttccgtacgggtgccgtggcggtggaaacaccttgcgagatggccgccgaggtcttggtgagttgacgcatgaattccgagtcttccacctgttgcaacgcgtccgacactccgtcagagattcgaagaccttgtttcttcatctcctcggcggctgcacggagctttgggttctccttgatcgaagcgacaatctgttaaagagcgagtcggcgagtcgaggcagatcagtactcagtcgtcatcatcatcaaacgggatggtgtcgcatcgggttgacgctcgaaaacgtaccctagacctctcgtacgcctccctagctttcttcatggcctcggaatccgcaaacttgtcgacatctccctgcaactttttcacatcctcttgcagctctcggttcttttggatctcttccttgagcgtctggacgaacactttgaacggcgattgaggagggaggttggagcgttcgttttgatggcgaggagaggtgtggaaggaggcagaggatgatgaagatggtgtagatgtcgaccaggtgagaccggtgggtaaggaggatggtcgaacggtgatcggatgagagggcaggatgagcggtcggatggggttccggcggaggtgcaagagctggtggataggtcgagaacgcatgataaagggcgatgcggtggtcggggtcgggctaggatgtagtctctgaagtagctagatcgaacttgtcgtggtaacgacggcgacgatgatggggggattggtatctaatagtcaagctcaacaaaaggttcttcaaggttgaccgtttgtgacttgtctggccgacccgacttttgccgtgtcagccaccggtcccagttgaggtgagtgtgctcgatcattcctcggcaacgcgggggatgccgagagatctggacacggacattgaagtatatccatttcgagcgatgaacgagcggacatggtcatctcaacctcgcggacatggcgtcgaaccgagtgatcatcattatcgttggatgtccgtgtcgattcctcattttctttccgcttctcccccctcgcgtcgattgattgcgcttctagttgacctttgcgcttcggagtttagttttctcacgacaccccccttacccatcacccctctccagttccgtccacgctccccatgtccaccctgccacaccccgcccggcacccgaagcccaacccagacccagaccccctctccctgatccctccgaacccatgggactcgcacatgcacgtcttttcccccgaatacctctctcccgcgcagatcagggactcgccttatacgcctccacgtgcgacgatcccgcaggcgattacagtcctggacgtcgggttcgggtcgacgggtagggtcgggatgacagacgagcgggattcacggggatcgggatggggagtgggagtggggacgaggatgtgtatcgtccagcctagcgtgtacggggtggacaataccgtcaccttggatggtctcaaagatctcaacttggctcgatcttccgctcaggtccgagattcaggtcgcagcgagcacgaccagggcgaggaagaggtggaggtgacagcgggaggatgcgcagtggtagaaatagacccgggggagacgtcggaaacgatgttgatggatcttcataaacgaggagctagaggagtccggtacgtcgccgatgtgaatcttttcctagacgtctctcctttcgcttcgctgtcaagaccccttttccccgtggatgagaaacacccccctaacctgacctgacctcatctcacctcacctcgtctcgtcccgcagcctcaacctgaaatcccggggtcaaaccctatccccggctgaccttcgacagacgctcgacacgtacgcccggttgatcaggtcatacggatgggcactccaggtatacttggggatggacatgctcgatggtctcgaacccggttgggtaggtgaattagggttagtctccggtccgagtcgagaaggtccggcatggagctgattcgaaatacccgcccctgatggactcgtcctatgaaccccttccacagtgttcctctcgtactcgatcatttcgcccatccccagctgagcaagagagggaccgacatccccgtcgatctcccggggtatcgatctttgctcgacctgtacgcacatccagggtcaaagttgtacgtcaaggtatccgggcagtaccggatcgttcctcctacacaggggacccgcgcagagaccctaaaaggagaaacaccaacgaacgacgtcgacgtcgacaccgacgagtactcggaattgaagcgcatcttcctagaactcgcgcggatcgacccgaccagattggtctggggttcagattggccgcacacgaggttcgaggggatcgatacgatcggctgggcgaggacggtcgtcggttggtgtcgagatttggcaagggaacaagccggacaaggcgcacaggcagacgagcgggcgcaagagttggtcggcatggtcttcaagaccaatgccgacgagttgtggttgggacgacgagtccgttgagatcccaaacgcggaccgaatcaagttgtagacatgccgcaaaaccatcatatacctaatcacacctgcgttcaccctctacaataaccctccaacgagcctcaaaagaaggctccgaacccgctcagatcgaccagatcgtttaatacagtctcccgattcgtcccgatcggttcggcaagctcgcgttgccggctgatgggcaggttgatatacgtcgacaagagttgaccatctaggatcgtcttggtaggttggcgtggcacgagcgggttatagacgttgctgtcgtaaacgaaacgacatcacgtcagtgccgctcaaatccactttgaagccgaccacggtactcaccggtacgccttcggattgagtcctgcgacgtgttggacgctccgtgtcaattggccctgcaacaactgtaaccgcttgaacctcgcggccttgctcgggatcaacgtgcttagtccaccgaattcattggctatgtgaggcggatccacgctcgtcaatcccggttcaccaccgccgtatctgcacatggcaactcacctagcgcgatttgagactgcgtcgccgacttgtcctcgttcgggcgtcgtcgagcgaccgccaacgtcttggtgatggtcgctccgcaatgatattctgtccgtcgcaacagtcgatcgcctccctcgacactgccagcctctgcaaggcaaagtcaccggtagacagaagcgtcagtcccttcgagggaacgctcgcatgcttcccagcaccccatgcggctcacgttcaggatcccactccaacacacgcatgttgccgctcgtatcggtcgcgacaaacgatgtcttgccctcggcgctcaaaaaatcgaccgacacggtcgaagcatcctggaaatcccgcgcaataacatcgagcttgtacggagattcctatgccgtagtacgaggtcagtctcgatcgctaaatccggtggatatgagacgaaacctacctggaagacgcagaaccagacactcttcaccatgtcgccaatcaaaacgaggttcttcatcgtcttgatgctcgtcgcgtacacgttggcgtccaagaacgctacgggtacgagtcgctcttcgtgttcgaacgccttgacatatatctacacgaatcgacatcgcttatcagtcgaatcttttagcgatgcggcgcgctcgacaggagaccctcaccttttgaccttcggctgtgatcaaatacgaccccacttcggcgatcgcagtcaccggctctttggcctcttcctcgcagatgaggcgcaaaccccaatccgctcgatctagcaagctttccgcgaccacttgcacgatctcaaatacgtaaatctgcgagaaaatgtgtcagcggagtagatgaccggcttcggcggccagaggacgctgaccttgccccgaccagacatgtcttcgccccggttgacacttgttccaacgaccaaaaacttgtcgttccgtctgcggtccccgagcagcatgctctcgacacatagcacaacctcattttcctcaaattcgtgcctgtcgcggtcgatgttacttagcatggagaatccaagatgaatgatgccacctcacccatcaaccactgtccacgtcgcaggatcaaacagttcgagcgtcgatctctcgaccgttggcggcgacaaattgggaactgaaacggcagattgtgatgaggctgggcgtgttgggttggtagctactcccggtctccgctcaccttcgggatcttcaatgatgacacactcgtcgctatacagctggtatggcgtagtaagagccgaggctccggcatagcatgacgatctggcatcatgaaccaaatgggtatagctccgctccgtctggatccgctcggccgtcaaaggcggtgtcgggtccatcgagctcgtaatttctaccgcgtagacgccctgaacaagacgaccgtttcattgagattgccatctacagaggacgagatcatcgaagctcacctcgacttcggccacagcgaacagggcactcgagacccgacgatcaggcgtcatgttgcacaacgaacgcacagctttggcatgcgggagtgtcttgacagatgccgtccctccggcgacgagccagaatggcgacgtgccagtcacaaagacgctagagatgtgagacgttgttacgggaattatctgacgaggcaatcgtccccgcgagaccaccttggtaaggacctttttgaatcggacagcaagtgaacgccgtgacatgtcggacccgaggttttccagagtaaatcgaggcgtcgcttcgtacactgtgagctgatcgtggttttgcaaaatctgagcaggtcgtcgtgtgagctttcgtcttcgatcccggtaacaggcgcccccgtatgaaaacccactatcaagtgcggctttgtcccattttcgcccagggttgcgaaggcgatgccttggaccagatcgtcttgttcctcatcctcgtccccatttatgttcagcttcatcgtggcatcggccttctccgctgcatcatcgagtagagccatcgaggcgtccagaatgccgtccgatgcgaaaactaggccaagttctggcagggatcgaatctgcgatcttagacgtaagcatccaacacgatttgattatttgcatttcagtctgacctctaatcggccggtcttggtgaccgcgcaaagccagtgagaccctttgactatccctacggtggcctccaggtcgctctcgactgatgtgctgatagatggtttcgtttcttgcaatctggcgagctgttccgaggtaagttgcatgcgattccccgacttggcgcttgccatctggttcttggcggtattgtgctcggtctgcttccctgtactgggatcgaaagttcgaaacacgccagaatcgtccgtgatgaggcacaccgccaaagaatcctcaagctgcaatacgaggcgtcaggaaacgccttaagacggttgggacatcgagagacccactggttctccgtcgggagggcggtacaattgtttcatctccagagtagacgcgtctccgtgaaagaccgacacatgacctcctttcgtaagcaccgtcacatacggctccgagattgaagccgagctaatcgagtcgccttcgtccattttgcagtacgtctgtttgaccgctccgtctgaatcaatcgaacgatgatcagcacggattaacagcgatgttccggcattccacgacgacggctaccttgatcgacgagggacatgttccgaggtgaaatccgtatgaaagacgaaccaccaaacatcggaccagctgccaccgttgcttctgagaagcgcttgatgggaactaattcgtcatcttcggattgcaaggccagtaactgaggtcaagaaagcccgaagttgagtgaaagagttgagattacacatagacaaggtgtaagaagcaagaaaggacttgcctcagtggattccgactcagagcacaagaacaaaccgctcgtctggaaggctgcgccggcaggtgcgtagggtttaacgctgggtcttcgtacacaccacaagccggcgcattcagtcgtttccgccagtttacgtcgtctcctcgtgcccaagccgggctgtacatttggcgccggtagcattagtcgtgaatccaaagaagtggacgtcatccttacacaccttgcatacatccactgtcgaggcaccgtcccctccatgcagaacagtgagttgaggcacggcttcgttttcatcggtccgctccatcccaagacaggcgtctactatatatccaaatccaggcagcgcgtgatccagtcggagtagagcgcgagtagcagtttcctcggacctcgtgccgtgactatcctgtttgaccgtcgaatcgccgtagagatctggtcacgccgatacatgaatcttagcaaagaatctgcaccacaacatgcaaggtacataccctcatcgagatccatatcgaggtcgttgtcggacttggtatcaagctggtcaacagcctcgattttgtatgcttccaactcaacctggtagacctcggaatcgccgatggcggatgccacaaagactcctcgcggcccaagcttgaccatgttggctggtgtcgtcgtttggccaacgatatgatcgagaattgaaagcttgtgtacggctcgaccttccaattcgaggcgaagctgtacagtttccccgttacgcaggctcaacaagaggttcttgtcatcgacccataccgctgccgacccatcgagttccgccttgcgctcttcctggctacgatcagccggcaaagccgtgatcatatcgtaccagccattcacactcgtagcgacccgacgtccgctttggtcgacgtgaatcacggccgtcgaggtgacaacgatgacgccgccgattgatgtggcgcatgcgagcatgtattggcagtcggcagggaggccagacacgctgctcaacgaagcgtacgttttagagaggacgtccagcgtcctgacttcgacgtgataggtatctttgagactttgcagccttccggtccaggtcggtcttggttcatagaggaaagccatggtcggattgttgaagccaggcaggaacaagaaatccttgacgttgcagagcgatttgctcatatcctcgagcggcaagacgaaactcggcatataaggcacgtccctgttaagcgccaagagacgatactttagtttggaccggtctaagaatttggtgataataagacttgggcaagctcactttccatacgcagcctcggcagcttccgtgtccatcaggtcctgcacgatggggagcattgccagggcgttcgagggcaaagacagcgctgccagcttattgttcggatccgtcctcaacagcggtcggtgggcatccacatcgccgtacatgacttgagcgcacctctcatacgtatgtagagacacggtggtcacctcccctcgggaccattcgagtagagccaactatgtgatacgacggatgagctcgagccggcgcttcgctgaaatcggatgtcgactcaccttggcgtctttaaagctgatcagcagcctgtcgagaccatcctcgagactgctcgtggtacggatccctgccaagccagtcactgacccatgcaacgtggtctggtacactatgtgtagccgaagcctgtttcggtctccctgagccttctacgaaccaccgatacaggtcgagcacgaacgatcaaccgaggatctaggtatacattttggggacgtcaggcttacctcttcggttccttctgaggctatatttctaaacccttcttcgtcgcccatatccgcatccatctgctcatcgccctgtatccggtcggtcttcccatcaagctgtcctcgagcttcccgttcgttctgttcgccgagcaagaccggctcttccctgacctcgaaaactctgagctccgaaccaccagcgacgatcaggttgccgatgatctttatccgtggtccatctgggtcgtccgagcttgatagaccgtaccgtcgtacccatgccggttgagggtaggggtagatggtcgacggggtaaagtgctcgaggaataagctatgccggatgcccgtctcggggatcaagggctgatggatcgcctgcatagttgcacgacgagatccgagctttatgagggtaatttcaacgatatgagagctccgtcgtggttgttctcaagcagtgttcagtctaggtaaacctcgagaaagccttgcacctcccccggttcgcttcagagattcgcaatctgactcagagaacgcataaagatgaaaccagctcgcatgatgcgttttcactgagctcgaagtcaagaaccgagaccgggaacgattcgatcgatggatatagacacagcaaaagggagacgaacatagtaaaagaaaaatggcctcttaaaacagtaatactggacatcgagtctcggtggacagactatgtgaagggagagagaaaagagacaaacgaggggtacggcacggtcgagcacgctaggtgcccgttcgctagatcagaccagctttcctcatcgatccgtcgacctagatcatgctagcgacgatgcttccgacgacggccaggacggctccagagacgattccctggccggcggtgaccttgtatccggcacccatgacggtcgcaccggtcgtgttgctcacaccagcctgggccgagatcgagtcggtaaagttggcaccgcaagtctgaccgatcccggtccagagctgctgttgtcctcccaagatgggggacgagccgagaccgagcgcgtagggcacttgagactcccacgagatgtaggcggccaggatcgacttggtgcaggtggagcagaggagcttggcgtccatgtcggcctggaggaagaggtaaggcaacgaggtcgtcctataggtcgtagcgttgggggtcatgtacgaggtctgagcgtcaccgggagcccgagccgagagctgggggaagaatcgtcgggcgagaccagcgatggggttgaagatgaccaagttgtcggccgcctggaggacgggggcaaagatatcggcaccggcagcggcaaacgagttgatcttgacggcgttggtggtgctgttggcgaccgaggtggcgttctcggcctgctcgggtgcggccgaagcggcagcggcctgcgaggcgatctccaagacgcagtacttctggctcgcgctgtccttggtgcagacggcggcacggaaggggttgacgatgtacaagtagtcgtacatctccctgatcctctccgagtacgaagcgtcggtcgaggtcaactcggcggaacaggccgagtagaattgaccgaggtagctcctcaattggctgtcgtcgcacttggtcgacgcggcgcagagctgagtcaaggtcgaggtgacggtcgaggaggtgacattttcgacattgagtccggtcaaggggttgaagttgttggtaatgttgtacaggggctcgacacagctcttgaatccggcgtgcttgtcaagactgtcgaggtacttggagcatccggcgctgagaccactaggaatcatggccgaagtacccgaggtggcagtgctagcagcggcagaagtggcagaagccgacgaagaggcagcagagtcctatagtgaaagcctttcaatgtcagcccacattgatcacggacccaccccccacccccccgaaagtgactcaccgaagcctgagcgtaagcctgcgaaccgccggccaagagaccgacgacgctcaaagagatggtttgtccaaacttcatccttgtttactagttcctttgattatgtgcttgtagaagggggttgtataagttgaaaagggcccgtaagactaggtcgattgtttgttgttggccggatttgatgacgcgggttgtgagagctggaccgaaaccgagttttcgtgagtatcactgaactgatgtaacgagtgccgctcagttcgacgggatcactcacctatggtcagacaggtgaagttgtttcgattgatgtggttgttaggtgggatgatccgactctctgttgttatgaaactcgcgagaaacggtcgaaaaaggaaggtgggttcgggaaaggactgtttgttgttgtttgtcgactactggactggtaaatgtcgagctgtagctgtgatggagatccggtgttgatgaagaggtcgcaaagtgaagagttccgtacggagtggtggcaggctgaaggtggtgatggaggaaaggtgagaaaaacccgggacgatctgggcacagtgtgatggttgatggggggacatgagtggatgttcaaagagaccgacccctgtgtccggagatcgaaagagggaattgatcagaggattcccccctcctcgctctctctcctctgcctgccgcccctcaacgccctgtctccctctctctctctctcccgctctctcgttgttttcccccttgctcgccgcgacacaaaggggaaaaaggcgcgtcgccgcgagggccactcccacggaaacaacaattcgagggtgagcgacccccgcgtggcgtcgtagattcatcaatcaaccatccgtgacctgcatgtgacctgtggtggcccgtctcacaaggtcgatcaccaagcctctactttcgttcttgacatgcatgtcggccacgccatacagcactgttcgacctagtctagcacaaaggctcgctctgagctcgtcgtttcatcctatccacctgcgatcccaaactacgcttcctttccgacttgccttgtctcctcctggggtcggctcggtagggtcgcctaaaggcaagctcttgctcctcgttctcctcccaaatcagaccaagagcaccgggatgccttctgaacgtttctgtcctgtgttccaagtctctgtcgaactgttcatgtgggtgaacacgacctggggatcgtctcggcgtggtgtctggcgagatgggtagcgcccacttgacccctccctttctcggcgtgacgggcgggacgatcacgccctcttcctcttgggcaggttcttgtacttccgagtaaatgatccgggcgagattgtagaccagtctcatcaacctccataatcccgtcttgaggagcaagtatgaccaggtctgcgcagtgtaggcgaggcgatagcactgtcagggcaccgctcggttctaaagaggttgcgagactcacggccatccaaaaagcccagtacatgccttcaaaggtcatagccaagcaggtctggaagatgccgaacatattaaagatccagggatatcggctcagtaaggtcgtgatgatctggacagcggggaccgccgacaacgtcggggcgagaacttgatcccaaactctcgaaattagatcatcatgtaggttgttggaaggccacacagcggctcactttcaaaaaggccatcaaaaatccccttgataccccaccgtgtcctactctgcttcctcttgtccaacccgtccctctcgccagcgaatcccgcctgcaaatcagcccacgctcgatgtccgtctttcgccgcttcgccctggtccatcaatgcagatcggatctcatccgcggcaagtctgtttgactcgagctgggctgtcgattcctcctgctccccatagcgaacacagattcagattttatatgacgtccgatagtttggtagaggttggcccgctcaccttgatcgtcgataccgtattcaccgcgtctcgcaacatcagatcgaggtccagtaattgaacagtgatagcacccagattctgatgaccgcctagtcttagcaatagaaccagttgaatagaatcgaattgcagacctacctgaccagcagactgcacgacggcgttcaatgcgacccagcgttcttcgacccgttcctacgacgtcgggaacacgaaggaagcgcgtgagtctgagctgagctctcctcaccgatatctcctatgctcaccatccttgtcatatccacctcgtacgctcgttcactcctttcttgcagcttggaagcgtgatccgccagtaccatcccgtgcctaagttcctgttgttccaaagcctctccgtactgccaaggacatatcaggatcttggtcactaccaatgacctctgcaagtcaactcacattccttagaacgtgattcagctcaatgcccagctcgttcaagctccttgcctcggtctccctgatgaccgtagccaatccaccctcggcagcgccgagtatcgcctcccatcgactctgtatgtcgagccagaactcttccttgagcagcaaggcttcctttacagtgcgatccaatctctgtagtccctcgtccgtagtcgtttcgtggcgggaaagatgtccgctcaagcgagtaccggcatcctcggcgttactcatgatgttccgcaatttctatggacggggcatctgatcagcttgaatgcggacgcttgcatatctatatgagactgtagctacctcgattctctccgataatcggtctgccagcatgtcgttgtcatccttccttgcgagttcgtgtcgcttgagcatctgcaaaaggaccagcttctccatagtagcatttcgatagatttccttggcgatgtctagatacgtagatggtcaagccacgtcagccttgacatcgagaaatggaatcgtcccggatcttacccagattttgttgccctttcaatgcatggcattgtttcgctgcaaaggttttttaaaacttccgtatggatctgagcaaggagggcgctaagatacttactggcgtcaccgagatatccgttatagctactccaatcttgaggactccggtgcaaagctcttcgtcacgtccagaggtcagatacggaacagaaatctcgtccgcccatgtgcgcactcactctaaacatctacctctcatgattcgtccttctatgtcgtcggctgggaacttatgccttccgagccactcatcgacctcgtctagcgtagccgtagattttcgttgatctgaagttgaactcgaaggagcacgaaccccggacggagattctgggttcgggtatggggaccagggttcgcattcgaccggagggctttgcagagcggatttgatggcgcataaagttaaagcgattgcgactgtagagctataagtgttcatacgttcataggccaccgagagttgtgtactaacttcctgtccgttcaccttcgtcccaattccgagcgctgggttcctcttgatggggtgaacatatcaaatggatgtgtcggcggatctgcccgtggcagtcctcaggaccgacggccccgatctgtctcgtcgtgtctgtcacgccgattcctatgagaacaattccggcgcccagaatacttgtataaggactcgccatgcctcctcacgatccctctttctactgtagtgacatcgaaatgagttctgcggagcattgatcgggaggtgacgagcgcgtacctagctctgccatcaatacctcgtctgtctcttgatatgcacgaggcggaggctcaacacccggatcaccgcgtccaacggtattcgcctgacctctccatcctagtatctctgcggtgaccagcccttggatcgtcaaaaggacgccagtcgctataagttgagtcgaacgcctttgttgattttgtggtatcggtcagctccgccgatgccggcgaactaagtctcgactgagtagaatatggttaaatgtatgtatgttaggatcggatgggcgactccatgcttaaaatcagagggagtgaggtgggttcgtatgggaaagcccttttcagttggcaacatgatgcctagttagccctttgatggaaggtccatcaacgaaagggaccttgggaccctgtgaccggtccaatcgaacctccacttttcaggatcgagcgatcgacatggctagtacgcgcgggaagaacggccgtcaagtgaaagcgcacgatcaacaaggccatcgtcattattgatatggcagttggagggcatggtgtatggttatctatagtacaactcagagagtctatccgttgtgcagatgtgggcaagatcctgccgcgactgtgcgggccttacttggcctgattcgcagcctcccaccagcctcgagctcgttcttccgagggaggcggtttgaagaacttgcacgacgatttgaaggctgtgacatgagagggacgggtcttgtatgagggacagcttgttgaatcggttgtcggcgaccactcaccctctaatgaccgttttcggatgatggcttcgacgctttgctcggtgtggagttggtttgcctgtattgtacgcagagcgaccctccatcagctccggtagccaggcctaataacaagagatcgtatggacatactaagacctcctcttcgaacagacctaaagctggtgactgccggttaggatcctccatttctacgtgtgctttccgtttggaattcaggttctcattcacgactcccgtgcagtacgtcaagagcttttgtctagcttcgtaaccggctatgtatcgtacacttcagtatgacatcaagttgaatctgtccgaccatggcactgaccgatcatctcttgccacaaggccaaacacatgtcttcctgtccttccgtactatagcacgaacaccgtccacatcagtcgcaagctctacggtactcgggcattcaagctgcgtttgacatacgaaggcagccctttcgaacgattcgtatccctcctcgctgcattggctcggttcagcttagtaacgatggtatcatcgagcttccgatactgcttcatcaagtctgcgaggatgacagccaacgtcagccgactaggtcacgcactcacggccagggcaaagaaacgaacccttgaagagactaagattgtagcatgttgctgaggagaccgatacttgtcgagggggcgacaggaaggtctctgcgtacgcgctcgcacttccaaaaggcagggatcctggtgtactcgatcgggacgtagaagcttgactcgtcatggtgcgtttctggagaggcctctcaagtgtatgatagtgctccgatggcgtagcactgtttgtggctgagctaggttagatgccagatgcttttatcaaagcgagtgagtgatgaatttgccatcgaagtcgactgttcgaggtcgtgcgatggcgatccccgatgacgaaccgcctgcattcgcccggcatcaaggcggtatttgcatccgaaaccaccagctgatctacctggaccggatcatgacattttcaacagcccagtcatcatgatgagcctcttcaattcccatcagcaagatgaacgcatataataacgtctagattgtacaccgagatacatcgtctggaaacaaatagcctctataggttggtctaatcgatacactgggttgggactgcactgtacgcccttagaaagtccatattgtctattataggtcctgaagagagaaaatgtccttgattctaaacgactcccgcttcatccgatcgtctcatcgtcgtcgatcgaggaggactattcgctacgatcggcggcctcctgcatttctcgcaaaaaggctacgacatcgtcttcgcgatccgcttggtctcgttcgacatgctctgggtcgccttcgaggacagcttcactgaccgccgccctctttttgaacgagatcttctcctcgaattgatcccatgcatcatgcatgtccaagtggagaccttcggcgtacgtatggcggtgtgccagagggcttccgaagacaaggtcgtgtccgaggtgcatgaaccgcacatcgacgaacgaaaagtagatgtgcagggcgacgactagtaccggaaagaggagaatgaggagaggcgacttgctgggtcgtcgacgggaagagtagggcgttgcgggtttcttctcccggctgggaaagatggcgaacgagaacatcccgttcgaactggccggcggcgagaacaaggccgaactccccgaaggtaagatttgggggagattgaatccgccctcggaagtctgactctgactcttgagcttctctagctcggccaccgacttggcatagtgcttggtcggtgaagtcggggcggatgtcgatgtcgaaagcgcccaatccaaagcagtattgatgctggaaggcagcgagaacgagcgtttgggctttgggacccgaggcacgttgagaccatcgacattttcctcggcctcttcctcgtccgacattcgccgcgatgctttgcgtcgaagccgtttggatggcgaaaaggtcgcaaagctcagaagggaaggacgcccgggaaaagaagggcggccggccggttgcctaggcaaaaacggattgtcgatcgaatacgatttgagaataggataggctgccggggcttgcggtggagctgtgaagatgaagggaacaagcagtctggtgagtacaatgtcggcaagtctgaattactgatgctggtatcgactcactaagcgtgatggcgggaactatgatcctgcgatctgccctagcatgtttctttggagtgacagtagcttcgtctccttccatttcaacgatgctgctcttcctactgctgcttgcactgctgctggggctcggctcgttcccgctgatgagggagaagtgtttgttgtcgagcatcgcgagctgcgagacgttgctctcggctaaggggaagctgaaaggcggcataggtacaggaggtggtgagggaaagcggttgaccgggacggctggttcagacaacgagagtggaagcggggctggtcgacgtgtcatggtagtggtcgacatgatggttgagccttttgaagatccgtcgtcgtcgtgacccggatctgctaatcgtgtcttccgtctgattcaaaaaagctcgaggtcagtcaggctgtcaagcattgtggtagatcgtcatacgccgagcatctcggtcgggaaggaagatctgataattgtcacagtcatcgtcggtcctcggcgaggatgggacctttctttttagctgttagacatcctcgcagaaattgggatcgatcgcccttctcgccccttttcatttgatgatcccgtcgaccggatgtcccggaagagggaccttttcgcaccggcacgctttgctgactgtcactactacgcgagtcacggtcatcctgctcgtctgatcattgcgaccaacccatcgtttcgctagtgtccgacggacgaatgatccgtgattcattgctcgattgctttcgcatggtcggtctgtggtacgtggagcatatagaaacgccgtcgagccgtcactgcaatgtagtcgtatcgtacaatgcgtgacgaataggttccgcgatgataggaatcccctcgaccgcccgtctccgatcgacgcgaatgtagaccgtcatcgaccgagatcggtgccagggaaatggaaagggatcgagactggaagagatctggaaatgggatcagagatggggcaaggtcgacgtacgtggatgatacgacgagatccacgcgtaaccggcggcagttgtcttctgtcgaggtggaacctattgttgattttcaaaagtcgaaagagttagctttgatgccaccaggacagctagcaccctgatagagtgatagactcacctttgacgttggtgtaacggagcgagatgtatggacgccgatatatgtggaacggctccccaggtcgtggcgagcagagcacgttttcccgattatttgctgcgagagcttgaataacaaggttctcgatcgagacccggctcgtgtttacgcgaaagatagagtgatgcgagggtgcggcgctgacgtcgtgatggcgatgaccctcctttgatgatgattgatcttcggattcaaggggtttgaaacggggtcacagcgtggagccgaggtgacgtgggattggaggtggatccgttcgcggccaaaggaaggttgagtgaccaaagggatttatgtatcaagaccaggggtgggtgaattgtatgatctatgaaccgatgaaaccctaatatgtcgaaaggacagctaatgtctcggtggtgtgtagtagtagtaatttgttgctggaacgacgagtggtgcgtgggtagtaaacgacgagccgatttctagccggtgtacttgtagggcggtgacttcctgtcgagtctcggcaaggtcgatcgtttcctggctcttcccgagagccggtcggaaggtgtcgaaggtggagttggcggggtagcgagggtcgcagcagtagctgatgtcgatatttggctcctggccgggtgatcgctgggcggcggattatcaatttgtttcctggtttcccttgcttggggttgttgtttccggaatgtcgaaatgatgatgattgatgagccgtgatgatggtaagacacggacgggaagggtcgggtagtcgaagcaaagtacaactcgtgcaagtctatatgccagctgtgtatctcaaacgaaaatgcctccaacctttacagctctgtctatgctacacgctaactgcaatctcaagaggcccaacaacagtatcgcccctctcttcaaaacaactggcagcaagacgacagaccggctcttggtgaacctacgatcgtacggaccttgccaggttcaatgagcggaatggcgtcgtcactcccctcgccctcgcgccctagaaggcccggccaagtgagaaggaaaagggcattgaccacgcgctactgcccgatgccagatcgggcggcacggtcacaatcgaaggcgggaaggagacaaaaggtaaaagaaacaagcaggggcgcgggcagtgaccggggaaatgacgcgaaaaaaagcttccaggcccacgaggggagccgaggctgacgtccgggcccaggtcaccacgctggaaaagccttcgtatgctggctgctggctgcatgcactggagactgaagcgagatctcgacgatctgtaggaacaaggttcgcggaaaagaaacatgtgtgaaaaggtaaacagaaggaaaagtgtgcaaccgagctgctcagccatgttaatcggcgtatcgtgaaagcgtaatctgatcgtaggattcaagttcggccttggttccaaggttgatggccgatggcaaagcatcgaaagagacaagcaagcaagctaagcgagtacatggaaatcatctgccagcctgctatcctgctatccgtaaaatactcgtttccttcccaagtaatgctcgataaggaattgtgcttatgccatccactcttgaagtcttcgaacgtcacacgaagactagaaattgctgaaaagtatgtctcggagcctgtgttgtaaatttgggaataggacacgggcacagtccacttgtgaagatatcgtgccgaagataagggaaagctagcgaacgagcagaaatgtgcgaataagcacacggtgcagcaggaacgtcatcctacgcaaagcttaccctcaaccctacagccgtacagatctcctctgaccagggccccttgagcttgctcgactcgacgggcggctcaactttttgggcgagacgggcggaccccgtatagatttggcatcgttgctcttgacccgaggcgctgttgcggcaaaatctttcatcggcttctcttgagcgttatcttgcttgacgccgctggagggcacattcttcctttcttgcaatgggttccggaccactttcctaggactatgggtgaagatggcttcttcgtcatcggcatcatcaaacttgaatgcagaatcgcctcggccatgatgttcctgcttcacgcctaatctctcactggctgctaggggagcggaagcggttgttgccggtatcaaggcgtcgtctgataacattgtctcacgttctcccctggctaccggcgccaaaatcagaggcttgagaccggaacgtggaggcaccccggaagtcatctggctactgttgcgtttgaaggtcgaaacgttgttttgcccgtgcacgctcgatcggaccgcctttctaccgccgctcgaaatcgtttccgaagtgatcgcttgaggtccgctggattcgggctgaggcacagaaggttctcttgacctattggagaccaaaatcagagtgttcctcgatgcatgtgatgccagggctggagagggtgagtcatgcataggatccattccgtccacagaatccatggtcatgaacgtttcggtggagaccttgccttccgcttcccgagtttggtgtgggatcggaagctgcaacgttgacgctgatgtgctgccagcaaatgagtgagggcggtgaagcgagctggtacgtgaccgagaagggtcgcgagtagacgagacgaatgcatcggttgccatactgtcgagttcggtcatgaccatttccatttcctccagttgctcaggatcgtggtcaaaggagagctcgaagccgtctatgggaagccctcgttcgtccagaacgtcgcggtccatcgcctctggttggtgcgtctcatggcctaccgagtgcggcacctcaaaactggagcagtaacggtttgagacttcttcaccctctgctaatgttgcgagcggagcatgcaggccattgatgttcggggcttgacttccggggagcgccaccggagtcgatgggttctctgtcgagacagcacgtcctgatatgcgctcgttcgcgctgctattcttcttgatcttgtgcgcagctttagcctccttgtcggcggctttgcgcatctgcgtcgggatgggcggaagatccagaccgacggcaagtgaatcaaggctagggcgagacttgagaatacccttcagcggactcttagtttctcgggaagctttacgcttgatcaggttgcgcttcgtgaccgcgggacccttcgctggggtatcgatcgagcgaccatactgcttgagagcttgtttgacgtcttctaacagtccagtttttggggagatcgcgggtaggctatgattgctcttgtgactgccacgtcgctgaagaccagacttgtcatggggtgtggaatgttgcaacggcagaccagaagcgaagtcgaacgatgcgtggccaaggtcgagggacgcagaactggcgtgaccggggagtggaggcggcacaaaatcgagtgaggggcggaacgggggtaaatccaacgattgtcgtgttatcgaataggaatgtcttccggaaggggtagacgactgtgtatcgtccgtaaccgggatgatttgtttactgaagatacttcagccttgtcagctagcatcccggagatacgcgattacggtgttctccgactgaccttgtcctacgccgggtaccttctatagcctcgacgatctccccatttccaaggaaatcgctggccagctccaaggtccgcctgcgcagctcttcagcttcacccggtaaggaggactcaaagttcgaagtcgcattgcatgacactccttcagcgacatatcccacctccggcttgccctcttcgaccagacccacggcttccatagatgggcgaggcgatattatcatgtctccttgactgccaccaaagaggaagactggtgtctgactcatacgagttcttgtggccagccttacctcggcggtcttgacagacttcgcgccgggactggtggctgcgctgttcctgtaggcagaacgatcgaattttgtcggagtttcgacttcgatggtgggaccaagggcgcgaatgggctcttctaacggaaggtcgtgataagccggcccagctttgaacgaaattggggacatcttgattcccaagccggatcgaggatttagtttaaacgctttgggagtggcgagggggtcttccgcttccagaccaggggaaacaattgatatttgaggccgaggcattttcatgctgatgatacggtccaacttgccagaggatctccgagcgtgtccgttttcaagccagacgtcgctagacagcctgtgcatctgaatatcttgctgtcggccacgctcgagattgacggcctgattgcgtcgggtgtcacgtccagcgttgagggctctcttcgggtcactgctgttcttgtatccaatcttggacaaggaaggaaaggcccgggcccaggcctcgatcgagattctgcggcgcgaatgactgccgctagggtgaatcgtccggctagacatctcggcgatcctatctaaccctgtctttggctcttggctcaaggtaaccttctccctgctccgtttaggcgacgatatcctagatgatagtacctcctccggaaggtggccgactagtatagatccggccaagagcaacggagctggcatgagcagtgagacaagataaaggcaaaaggaaaggcgcgtggctttgatcgccaggggtagcgcgaacgcctgcgtgacgtgaagcatggaatgggagcatcagcatcagctacgcgacctgtaaaaaatgttatccgaaacttacccagcagatccacaaaaccgtaatgccggctattccgagtgcgcctaacctcaattcggccttgcttctctcctccatgatcgaagtttcattggcgatatccgctgcctggatgagctcctcgatttcgttgtatcgtgtctcgttcgaggtgtctcgaccgctcggttgaccgggcaggagcaacgggtccgtcgagtatttcccatttgatccgaacgcggtagtcgccggcgtcaagatggagttgtaggagaacggcgatatacgaccggcagcggacggaagcgggccgtcctccgtcgtcttaagtggcatggtgacatactgaggaattgtggaccccggtcgagagatagtagcacgagagctactcctgtcaattttgccggcctgcgcataatcggtcgcatcgctcgaagctcggggtcgtccgaactgcttcgcgacaggacaagctgggagaggcaaggcgggcggttctccgatcggtgagggagcgcgactgcgcctgctctccatgctaggacctctcctgggctcgacaccttcgtcgcggaggtgctcgtgttcccccgactggcccggtacgaacgtgggatagctacgggtctgtccgttatgatcttgaccgatatcgctgaaagtcaagctgacacttcggggaaagctcatgtcaccttcgtcgatggccgagtgataagtctcctcggaaagagtgctagtgtttccccgaagaggacggattccaacaccattggccagcgaagtgaaattcatgtcgaatggattggacgatttgaggatggaaggcccttcgttcaaaaaggatcgcccgcccgctgcttcctcagaggttctcgatcggtagggcagaggaagttcgggcaccggctcgctcgtctcgccaaaggagaacgagctgaagctggtcggcgtcttggacggttcggtgatccaggaggatttcctcatcctctccgagctgttacgacccatagcagattccggccgattgtcgctcacccggctactactcctcgtccgggccatctcgggggtccttggcgtctgcaatccgtctgaatcggcgtcaccgatgatgaatggagtcgtaggacgggacgactctccgcgttgacgctgaacatgtccctgagatggggaaccgacggtcgtattgtaagaaaaggacgagaatggttccgtgttattactgttgtcgactgcatcccggagtttcatcagccactatcctatatggccgaattgtcattcaaggagtactcacttcgctccgtcaaccaactactatcgggtctcatctcctcaatatcatcttccctagtgttcacgcgaccggctttacttcctggctcatccgtcagtagctcgatccggttcttgccaagcatgcgacagatgacctcggttcgcttgcagatggcgaaagtaaggacgatcaaacaggctccagagatccctaatacgatgtagagcgagacgaacgccgcaaggcatgagacaccgagtgtaattccgacaccgatgaagatgagtgagcgaggagcgatcttcgacaatgattggacggcgggtggcgaggcgagcgtgacagccatgatcgggagtgaggcgaccgtggttgcataggcgatattcagggcggaagaagattgggatctgtgcagggagaggtaaaggacccccgagatcaccgtgatcagaccggcaatgaccattcctaccaagggcatcacccaagcttccgacctgttctcgctaccttctcctgaaaccttctggctttcctttcgaggttcagccgatcctcggaagatggctcggaacccaacatcgttctcctcacttggtcgaggaggcatgccgaaatcctcccttcgtaccattttcgctcggtcacctaggagtaacggccgaatgttcagggacgtcttcgaggttttattaccgccgttgtcgttgttgaagggtttggtccggttcgacggaatggcgagatttggaaaggagggtagtacaagctggctggaaaggtacttgcggcgaaagattggaacaacgagcatcgtcaacacgaggacgagaggaatgatccccagtagcgtagggaccgtggcggacactgccaatgggaggctggcattggcgaccatgacgggataaatagagtcgaacacaacgatagtaggagtggtctgacagcgactgtacacttgaagaattgcgtcttctccccgatatcccggttgcgcgccggagtcgagttagggagtgtgtattgcttcagatgaatagcaagtaatcgtagaatagttcaagtagcaaggcgagcgagtcacgatcgtagaggtttaaggatatcagagcagtcctattgaaaggagaacagttgaagagttgaaggatgttctttgtaactgtttgtttatgtcgatgaccaccgacgtcgacggcaacgatgatcatgcgattcctttttgatctgaaacgcggtaaacaaattcgccgcccgtcgcccggcgcccctgcgcgtagagagtagaatatcaatcaacccgcgtttgatcgatcaattcaaaatagaagtgatcacgatcaaccagagggaacatcatcaaacgtaaacaaatccaccagatcggcttacataagatccctctggcctctggacggttgagtaaaatagcaacctgcagtagttttcggctctcgtattctcctcattccacctcgagccacccttggcgccaaaatgccgctgtgaactctagcgtggtccttggggaaggtgagtggggcgcgaatcacggccttccaaagaccgagcatctggtttgggagggggtgcacgcggagaaattctgctgttgacatgccaattgttagactcggaacttgttgtaatttacaatatccatctcagggtacatttggttactcttcgcctacttccctaaacccacgccttgccctcggacgccaaactcgaaagcatccccccggtcaaggtacagcaccttctggcccagcccggcggactggacctctttctcaaagtccgatcgaggcgactgcggaagggtcatttccgcatcagtaacagcttcgatcacgatacaataagcatcttggcactcacggcaaagacgtcgtaatcgtcgaaatgcacggggatggtcagcttgggggaaatgagcctgaccaattggattccctgtttcccgtccatcgtctatgatgtaatacatcgaattgattagcttaccggcgtgaagaagaagctgggtcagatttgctcacgaccatgagcaacggtgcgttagggcccgggatggatgtcccgcccaagtggatcaggagtaggtccacgtcgggatatcgtgccgggatttcctgcacgtgatgtgatggggatcaaatatcaactagactgtatcgtctgttttgtgttgtctgtctcagcttactttcaggtcgtccactaatacatgaacaggacgtatcgtcagtagtcggtttcgctctcgtcaaacctgaggctaggaggacgtacccatcaacgtatctcccgagatataaattcggtacccgacctcgaccacattctcttccccttctttctgatagccgagctccaacatgtgtccattcgtctatatccattacaagcacctcagtcctgccacatagcgggcagaagacacatgtgctcaccggtgggatggcatgcaagatggcgtcattcacagcgccgatcaccccggcgatatgtttccctattagttgacgtcgggccaaaagatcagctgctggtattaccttattattgggaccgccctggtcgacaggggagagggtggaacactaaaaaggtacaagacttgcctggagtagccacgacccggaccacgggtttcttctcgacctggccgggagtatcagtgatcttcaacaaggtcgattcccacacgtccatcccgaactgataccaagattgaatcgatcagcctcgtgtcaactcgtacgaccatttctaagtcgcaacgaaaatcaagggccatccaggctgaccacgtcggtgaaagctcctccattcccttgaagacccctgagttcctcttcagcgtgtcgggtggtgacgatcggtaaatccttcctgagcttctcttggacgagctggtcaaagtggtctattcgagcgtcaacatcgtgttattagccagagaaacagatcgaccatgtgcagggagaacggtgagtctttattgcgacactcaccagcgtggaaatgactgagcacgacgacgtctacgctgggcaagtcctcgatggggaatgccgggtcggtcaacctggtcccagttacacccgggcctagatggacgtggtcgccggcctattgccgaccggggagagcactcagtctcgcgcctgaatgaaatttttggaaggtcgtcccgttcatatactcacatgaagctgaaaagtgagcgggggacggtgcagagtcagcttggaacggaccacagtatgaagagcgaggcagacgaaatagctcacaaagttgggatccgtcatgatccgaacgccttgcctatgaaggatcaatcatttcagtctgaagaccgcgctgtagtgctttccggttccggttcctaggactgaccattccaggacacaagtggccgtaccgacaaagaccaatcgcgccttgctcgctccatccgcttccccgctcgtccccctctcggagaacggggcagacgggtgggtcttgatttcacccttcagtggcacctcggtacgaggagggaacacgggtgggtcgagaggtggtctcttggcggatgggagggccgagagggtgagcgtgtgtaaaggtttaggatctgtgtggccgggttgaacggtagtcattctgaattatagtgtcgcgtgaagctggggcgggcgtgttgcggtaggttcgaagagcggtctgggactgtacggtatgaagttttcgagaaggtcgtctagcttgttgggtagtcgggactgtgtaggagtgatctcattgacctgacgttgtgcacaggtaggtgtatttcgtcagcttcggtcgttccgaagtggaggtaggtcgcgaagaccgaggtgcgaagcgatgaatgacgtcatcaattctcggcatattattctgctcaaatttacgaattacgtaatagattgaccatatcaacagagcaatggatgcgacacgcctctgcgcttgacagcctgcagtctacgcctccattcaatccctctcagtcttccagatcatagtctccttcaattcgaccaccgctttgtgcttcaaacttttcaacgtggaccctaccaggatctcaaactgacccttctccgccacccaccagtcgcgtctgtcgtagaaaaacttgagcgcatgcttgtcgagcttgatggacgcggtccccatctgcccaggctcgagactgagcttcgcatatcccttgagttccgacgtgggtcggaccgaggaggataccaggtcgttgatgtatacctggacgacttccttgccagccaaatctccggtgttttttacgtcgaccttgacctcgaattcccccgcagccgagatgggcgagacatcgagattcgagtactcgaacgtcgtatacgagagtcatgaccaaaggaaaaggcgacgggcaccttgaatgattcgtaatatcggtatccgacgtgcgcaccctcgttgtaaacgacacggccggggttagcggtatcaatgccgaaacccagggaagctgggacatcgatgaggcgcttcctgcaaagttgactgtatcgtcagcttccacgcgcgtaatgcgacctaaccactgcaatgcgcacgggaatgagactggcagacatccagatgggttgaccttgccgaaaagcacatcggcgattccatttccgacctcgttgcccccgtaaaacgattggaggagggtgtgcaccttgtccagccaaggcatatgtaccggcatcccggtctgattgatgacgatcgtgtttgggttgacagcgaggaccgcttctaccaaggcgttctgtcgtccgggaagcctgcgggattggcaagagatcagcgaggggtactacgaatctttaacgaatattctcgcacgtactccatatcctttcgatcgaaaccctcggtctcaaactcttcggtgaggccgacgatgacaatggcaaggtcactcgacgaggccagcttggaagccgctcggacgctttcctccgggtcgacaatccgttgggcaccgagcctgagcccgtaagtcatctggatgaagcctagaccgtacctaaacatgccccgaatttcgatggggtatgattgccccttcacgaggtctttgataaccacacgtcgctcagtcgaacccatggtaaagaacaattcgccctcctcgtaattttcgctgttctcgatgagcaatctgccatcaaagaagaggttgacgttgccagccgaaccgagactgaactcccagtcgccagattcatcgggaacaaacgtggtcatgtactgagagaggaaacaaattcagataaggggagtcgattcagtgtcgatccggggaacttaccctgttgcattgatcaggaacggccatgggtgcgaactcgccatcgagaagcatgacaaatccgcccttttgtttggataagtgatcaggtgtcgtatcagcggccaagtcggtgatgtcattgagccaatcggcgccggggttgttgggaggcagccagaactctaatgttccctcggagctaccatcatgtttcgatttcagatatggagtggcaagtgggaggttcaagttgacaccagctccgagagaataatcgacctgagcaccgatctcattggcggtcgttgtgatggcttccagaggactgacgacgtaggcggatctcaatgcggccgaccctccacccattgccacagggaaggaagcgttctggccgaaaacggcgatcttctttggaccgtttctgatgggcaggagatggcagttgttcttcaagaggacgacagcttcgcctgctgcccgacgcataaacgctttgacgtcgtcatcatccacagagctctcaccgagctcgaacgatcgaccggactctacggcaaacttcgcgagactcaggacctgttatgagataatgattcaggagacaacttaacttagatgatcaatctgtgcttacgctcttgacgcaagggtctagatcatattctgccaactttccgctacccatctgacggcggatctggtcacctcggaagatacctggtccgggcatctcgaggtccattccagccttggtactgatgtcggtactgtagacgcctgtccggtaacccctaacgatcttccccatggatgccacactgcgctcgaattcgcctaaaaggctctcgcgagagataacaccaacatggctcgtctcaccgccaatgacgaagagcgagtggagagcctttgggacgacctctacgcggccatagagtcgctccgaaagattgcgagcgacgtttcgcccaaagggatactcttctggggcatgaactcggtcgcgttgcatgcttccaaatgtggcatgttgttgacaaaggtgagtccggtcgggtccatgcgggatttgtcgaaagcagcacaacctcgaacgggttgtcgttttcttcgaagcatatcgcctcgctcaccccagcgatcgctcgtggcgtgatggctatctttgaagacatttatcgagcatcctcgggcggcgctagcgcagggaacaggaggctgtatctcgccaagcttttcggaagcttgttgaggatttccgtgaggcggttggaagcggccaaggtgaatcgcaaagtggctggccaggaggttgaccggtcggatggccggatccaaggtggtagcggcaccgacggagcaccggaagatacccgtccaattcagctcggactttgggaggagaggaagacgggacgtttatcgacctgcagtccgctgatgatttcaacagtcgaatggaactggaagcctttatcgatgattatgtattacagtgagtggatcaatatgattgtgatcagggtcaccagtgaccgacgatccgtgcgcgtgacaggttttcgaatcaaggacaagtggcgttccatacgggagagagcgtgggcgggcacgacactttgcagacgctatcacactcgaattaccaggctcaatttggcggaggagtgcatgcaggcactgcctgtgacgattgcttcgattagccgtcatgcatggtatcacctggatttgacgatatggggcggggctattcatgcgttctcgagatgcggatttggtgattgctcaaggaatccggaaccctaccgcacggacagtgttcatatccgattgatatgcactttggtatctgcgcgagttgtcttggtggttgtcaagctctccgtaagcgtcgatatattgttggtttcaggcgtgggagggttgaggtgatgacgacattgttgtgtcaatcacgtgattgatgttagggtctgtggattacgtaatctcttctgcgtgcaaattcggatccgctcgctagtttgacttgatccctcccccctttctctccccgccccatcaatcgagagacgatatgatgatcctaacccaactagctaggtaacttcacagtcaccacttcatttcgactcatcatacatagcgacacctacccttgcactgttagacacatacataccggggtcgtccatcttatcgaccccgcaatcgaacatatcatagtcctcacgccccgactgccgcaccataccccccgccggtcccgcacggacaataaacaccagaacttgtcgacttcgtcgtcgtcatcgtcatcatggatctctcatcactatacaacacgctatccacaccgccagatagattgcaacaggcagagaatgagatgatggaacgattcaagggtcagtacaagggtcggctctagtcgttttatcgtgcattccgctgatagagggattcgtttgttcgctgctcacacgatcgtctcgtgaccactttgattgttcatcgacccttatgcctcctcgctcgaccgcctgctccgaccggtacattgaattggctctctgacagccgcggcactgagcataacacacctctacaagtcatctgtccatacatcaaaggtgagtctgctgccctctttctcccttcactgccctgcgaataccccgtggaagggtcgccttgagccgtgctgcggtaaccctccctcctcaggcgctgatacatgactcatttcccgttctttcccgaccgtatgatcatgtagcaagcataccgagcgggatactcggcttgcctgtaagtccatcaactccgctcgaccctacccgtcacccggtcgagcgtatcgtagcgtaccgtatcgtattctgactccctattctctcgtcttgacgccgctctggcgaacagtaacgacgtccttcagacccttcaagcgtcattatccaccacttcaccagctttacacccgagggcccaggtggacgaggcggtccagggggaagaggcagggaaggtcctggggaggttgatggattgggtcgaagcgaggcaggtaagtcggctcgaccccagatgatgaccaaggcaagagaggtgttcatcttctcggatcgggacgattgcgtcttgctctttccgggccgactggtaggaagcgatcaagttggagacggaagaggaaaaggaaaaggaagaggccgagtccagtgcgacaacgacgacggcaggcggggcaggagggagtaagctacgacgaccggtcggtccgacgagagtggattctatgcaacctgaacgacccgctcggtcggtcttgcaagcggcatcagcatcggcttcggcggctgcgtctacacccacgccagtgaggacgatgacggggttgggcaagacggacgatgtcgaggatatggtggaagaaggaaacgatgcggagggaataaacccggccaggaagccttccggggcgatccgacaacgagacgcgctggtccaagccgtcgccaacgcccgagccaaggatcgcggcgggatcagggaagacgtcaacgtcaacgaggacaaggacaaggtggaccggttcgccccgttcgccctgacccgtccttcctcgccgatccctatcaacgcgatccgggaatcgaccaacccgaacccttcttccccattgacgcccactcctcaggcgtatgcggggcatcatcgtccgttcaaggggttcggtcagcattatcgaggaggatcggatcatcggagtaaactcatcaacctgaatcggagggaatctcacgggttcaatcccaatttcgggaacgccgaggttcccctgttcccggggacagagacggtcgcggacgtcacggcgggcgaaatggtacccggggcatatggattcttatccgccgggaacaacgggacgggtccgacgccgggtgtaccgcttggaggaaatgcaggacttcattcgggtgggaaacgagcgcatgagaacgcatttggggggtccgcacccgtcgctctccctctgaacggggtgtcgaacggttcagtctttgggagcgtaccgtcaaacaccctgggtgggaacggatcgggacacgtagggacgggcgggaatggacggtcgggaaggaggaggggtgggaatcatgggtttgccggtttcgccatgcgggggaacgggcaggtgcaagggagcgagggggaggacgacgtgatcgagggcagggagaggaagaggatcgctaggcggtagtcggacgctccgcgcctcgatcagatcggtagaagtagatcagcgggtcgacacgctgctctcgatgtcttagaccacacgtctacggcaacgggtttcgactaggactccgagtcacgtcaaggtcatctcaccttaccttcaacacgcaacattacacacctgcactcgatcattccatacaacgtcaatgacgaaccaccatatcagccacccagacgacacagccacatgtgcacaaccgtacacccatcatattaccacacaaacacccacacgacccctgggaacagaccaggctgaagcgctagccggggtccgatacgggacgcacccaacgcgaacgggaccgcatgattggatcccctcgccctccgttgtagaagagatagaaacgtgatcagcatgtcaatctcggtactgttgtaagattctagaacccatgtagcataagactgcgaagatcgagtcggattgagttcaagttgtgggttttgatacatcgccgccgcttccctagcttgagcggatgttgatacgcgacgctcgccagcttggcttggaaactcaaaacacttactcaactcgactggactcgacctgtctgatcattcattcattgactcgtccatcacactctcccaagactcccttctcaagtctctcctattgccctacatcgcatctcgtcttggctcttggtccgcacattcctgactcctaccttcgtatcgaacggttacgaccctggccgcgggtcatcctgtatattccacttgacagcagcggaccgtctgccacctgaccgacgactacctttgacattgcgtccggccatttcattctgtactctaattgaggggtacgtcgtcctgctcgctcttcacatcgctcgcctcatctcaccatccccctacccccagccctcattcgacctcttcacatggctccaccagcagcaacaatcacggcggccccatcgtcacccgcccaccctcctgtaccttcaagacagatgtccaatagcaatacgtcctccaggccaaccacaccacagaatgcaaggtcgaaatcttctcgacagagaaaggatcaacctgtcaccgacaaggacgcggccgacttgactgaatccactcgtacccggtcagaacctcgacaaccacgtaacaaacctctccccaccgcctcacaactccgtcaaatggactcgggcgactctaccaacgcccgcccgaggggtatcatcaatatccccaagcaagatatcgacagctcgaccagatcgagatcacgccaaggtcgagcctcagctgactcgcaacatgatctcgtcaccaccagcaaggcggccggggataggaagcgatcgagaccggcaaaggggtcggcaaagggacgacccgctgccgacgatatcactaccgaggatgacgtcttttcagcaggggttcatcctccaacttcgtacggcaagctcgaaccccctaccaaccatgtcaaggatggcaagcccggccgtcgacctcgtcataaccggaccgtatctgaaccgttcagtgtggtcagcgggacggccggggatgattcctttgtccaacacgataccaagggcttgcctgctcaagggaaatctcgtaggaaacggcgtgaaaaggacaaggacaaagatcggggtggaggaggaggcggtaggggtgctgaagtacccctcgctccagctctaggcaacctacatatccaggctgggaccacgaccgatatcgattcggacgtgtccaagcaacctcccaagcggaccggattgcggttccctctgactgaagatgatgatggcgattcgaccacttcggacaggcctgaagaggtcggcatctcggacgattcgggcatcgcttttgatcggaacgtccatgacgggcagtccggtcaatctatccagggtcgtccgttcgaagatctcaacaatgccggtgcgaggctcctacatgaactgagatcactcagtcagagtgcgcccggtggaaagagctacttgaccgaccatacacgggtggacgacgggtacggctcggggtctgggtatggttcagctcaagggcaacgcgcggaaagagcagggaaaggtgcgagcagacgtcagcccaatgcaggggccagaggtgatttgcaagacgagagcgccgtatgggacatgccaggtttgcaagagagaggtagcggcacggatcttactgtgagcgcgaaacctcatacatctgcatcctgtcgtcatactgacactgccctcctagtggcaacaatcgctgctcgcttcgccagctgccaacctacgaactcagacgcctagacgtgccaaggaaggtaaaccgtcgactccgacagcagccccgagtgccagcaagagaaatctgtcgacccgagtgactcaaggattcactccttccaaatcccaaatgcgagatcacgagacgttcggttccacgccggcgagcggtcctgctcaacttcgcaacacgccatcaggctttgcgaccccgatgaaacacacgcaacgtctacagaacgaccgacctcatcctcatcataccatgtccgcgccagtcaatggctttgcagcggccgagccggtcaagcgttcggtcgtcgacgatgtcaaggtctatgccgggccgactttccataacagtcccagcgccgatagcttgcctgcacccaggatgaagggcgcttgagaaggtatgcgcggggattcgtctattcggtacatgctctggccaagtggagcatagccacgagttatgaatggattgtcaaaggagcgtagcccggtcagccttctcaggagcaatgagaaaggccgtccgaacaacactgtcggtcgtcgttcaaccgacgttcggatcgtaccagacaggtcgatcggactttataggacccttgtatctttgccataccttacggggaacatgaagacgatcgagattctggcgcgatgagggagagcggattgccctcgaggttcctttcatagtatccctccggtccgcgcccgcgtcacataatgagcctctgatctgggaactcctacctattacgggtgctgcgggttgacactatcgattcactcgcaggcatttcatctctcctccagtcgtataggttcgttcgacgtctttcaattccctctcttccaccctcaacatgcccctccccccttccccttccacatcctggcactcggcggcctcctcatcttcttccgtcaccctctccagtatccctccccaattagcctcgcctgtgtcctcccactccagtcgacgcagatcatactttccccagggtgtttcccagctatccccgagggaagcgctcgtgcatccaccgacagcagaaacgaaacatgacgtaaaacctgcatcgtcatctctcgcggacgatgatatgcaaccagaagccgtagagctggagcagagagtgccccctaaagtgggaagcagacgaagtgtgaagggattttcacgcgtgggcagcaatatgactacacggtcagacctggaaacaaagcagcaaaggccacccgtcccgcctctgccaacatgcccagcgctggacctctcggaggattgcagctcgagattgagagacgaaccggttacgcctacagtccagcgtaaacagtccaagtgcgagtcgccgacggctctggcttacttgataccctcaccgcagaaagtttcgtcgccagggggatttgaagctatcggccagatcgcgctacaaagtgcgaccttgcagagcacctttccgcgagaccgttgcctgcctccgaacaacagtatccacagtggaaagggtgccgaacgcgaggcttctcttggttctttcgacgatcgtaagccccctcggtattcaggacaacccccaggcgtagccaatgaaaaggcacctgaaaattgggcgaaagatcttggccagatcaaaacgatctcagttcacggtgaggaagacgagtcgcctgagctcagtgaccaagaatctttcgatgaagtcgctaaggtatcacctggagctgcccagcctcccgcgagaggccaatctgctactagtcatctgcctacggccaagggcaagggaagcgtcaaagctaccgtgctttctgaaacgcgactgacgtggaaagagcgattgcaacgctcatttcaagcctacgacgacccgaatgcttcctctcattcacttccccgctttcatcggatggtcgaaccggcggttttgctcttgcctataatcgtcagtttctaccttgttggaagcgccatcgttccgttcgagtggtggcgggcccggttgagcatcgcacgggtcggtcttgcgggacaaagcgcggagagcgatgaccgcatagttgaaggagaggagatcggtctctttggtgtatggggttggtgtgtcatgaatagtgaggaagtgtgagttggtccgcctgcgacaagatcgatcagtccccgcttacgagactcgaatccgccagtgcgcgctgctcgcctgccaagtttgggtatacgatggactctttggttgacgatattgggtttacgtgaggaggtcgaattcattactactggcaacttgctgatgatagacgatcaggagcttttccaaaggcctgttgcagctacccaacgggatcttttacgcgtttctgctgcatagcctgagtaagatcccggcaaggtacccttgacgattgtacgttagtttccactcacaaattctcatctcagccgttaccttgtgcggtcttgcgcttctactgtcctcctatcactgctggttgcgtcaccttgtgaacaactccagagtgagtctcgcgccgcaccggaacgtgaacgtgcaactctaaccgtgctcgtcgccttagcgtaaagcaggttggctacaacatggtacaatcctcgcagcctcgatggcttccctggcagctgtaagccggcttgtcaaatttccaaccgggtgaccaagtcgctgacattcggcgccgaatagtggatcgtggacaagctgtttctctttttcgtaaaggaaaagctcaaactggatatcacacgcgaaagcagcgaccatgtggtcgaaagtgggcaagtttgagcagggtatgaggtcgcctaccaacgttaatcatccgctactatcgacagtggaattcctccctcggtcgcagcagcgacttgccttctcatttggagtttcggcatgtcactttgcccgaacctgattgtacacttgcggaggcaccactcatttgtccgtgaaagagagcgagcggtcgaggatagcctcgagcgaggcgaatgggatagctacacggattcgcaagcagacaaggatgtccctcgaaaacatcaacgttcgacgtccaaacctagatctgaaggcaagccggtacacacgggatcgagcgagaagcgtcgtagaagggagaccatgaccaagtcggcgcgctacaggaaacgagagaagcagcggaaagtcagacggagggcgaaaagggcgaccctgatttcgaaacgtcggtcgacctggcttccctctagaaatgactcggacgacgagaccggcagtgacgtgtcggcggatgactacgacgacattgcaactaagcgactcgaaaagcggtgggcgagagaagaagctatcaaggcggcaatgtctcggtcaggtaaggggacaaccggacatgccacgggtccggctcgcaaggggcttagcacctggtatcacggtgaaagtgatgacgagcaggagaccgaacctcgcgaaaggcgccatcgagataccctgggtcgtcgtgtctctacctggttcgtagagttgcctcgtcgagacaacaagccgagagtcaaggggaagaagaccgatcgacatggcccgtcccgcaggaagaggtcacgcgacgagactgacgaggaggatgagggcagcgacgtcgacgtcgaccacattctcaagatggcgctgggagattccaaccattccatgcagccggatgacggtttgatgtatgacgacgagtttctcgactggacagatgacgatattgtggacgacggtcgaaagaagggtagggccaagtattaggctggtgtgcaggtgcaggtgtcatgcataagatgggatgtatagcgtcggcgtatacaagggtgaatctatcgtccacaccattactttggtatttgaattatacaaccgaagatgaggaaaaccggttctgatgtcgtaagtcgtaaaggcaaacttgtgccgaatctatgccacgcgatgtgccgtcgttcttgagaagacgaacccgtctaccactcgatgactccggggatgtacttgtcgatcaggctcatgtagtagggcttgagttcgatgaccgaaggggggttatccgacttggagtagaggtcgtacgggttgaacgccttgaccgctcggagctggtcctcgtccccgtcgcgcatgaggtgacgataagcgccttctcggtgccaagggtaaaaggagtggtatcggatcatcgagagggcttccttgggcactgtaaagggcgccaagaggtcagacgtcggttgtgtggcagggcgacgagagcactgggcgactcacaagtagactgatccttcaagacgtggtacaggtactcgtcgtgtccccatgagagcaagacgttgtcgagaccacagccgggctcatagataccgttctcggtcatcaacttggggtcattgtagtcggggttggcttcgactgcggggcggaggagcgcattggattagcgtcgggttctttgcacggggtcgggggccagcggcaacgaccgactcacaagttgaagggtaaatgatctggtccgaaaacttgcaaccgacgacgaaagtgtcgccgacgacatcccattgaccgtcagcgccgtaaaagcagagaagcttgccgagatcgtggaccaatccggtgagctgcatccagtcgggcttgccgtcccgtcgcatggcctcggcggtctggagcaagtgctggatctgggagaggctggtgtccgggtcgctctcgtcgatgagggtgtcgagtttttcgatggcttcccagatggtcatgcgagcccgggtctctttatgaaaggcctctcgggccttgaggttgtattcgagagtttgctttgcgtgctgctcggcgtagaatttctacgagttgcgtttcgaaacaagaggtcgttagttagcggtccggaagcaaaagccgcgcgagagaccggggcggaggggactcgtccgcgccaggctccactctcgctctcaccttgacatggtccttggcgtcttcgtagtttcggaacgtttccttttccttggactcgtcaaacttggactcttggtcaaaggcggcggcgtcacctttgagttgacctttgaggacgttgacctcgtcgatcatgtcggaagtggcatcgagctctcggcctcgggtggcagtgacggcgaccatgatggtggtggtgggaagcgtgtgtaggtgggtgggtgcgatatgtggtagtcgatcgaggtcggactatgcaggcagactacgtgcgttctgatggatgatgttggtctatcctgtcacaaggctagcggggcaataaagcgtttgctttccatgctcccttcttatatcacgcctgctcctcccggttttggcaaaactcgccatacctctccgacctcgggcggttttttgcgggcagatgggcaaaaaaaaccgcccgagataccggaccgtcagctatgccgcaggacacgtgagctgtcgttcgtggtagcccccgtcgtcgattcccggtcggctggattatctgctttaccattcgtcgacagaggtgtgcgtcgttccggtcgtcgctagatccacccgtggcgtagagccttttgatgtttcgttttaggtcatccatgatacgcgcgacgacaacttttgccccgtacgaccgatcgtcgcgacaagacggggcggggtcgtcacgtcatgttgcctcgttacaggtcgtccgggtcttggccgatcgatggagaggacccgctcgtcaggtgtgatgtcgtgacgtttcctcggtaacgtcgatccccctcgaaaggcttctccccgcgcaaatcggttcattctccgggcgggccgaattgcctccgcccggggttcgttgtgggtcgtcgtcgcacgtcggcaatatgctgacattgtgcatcgtgaccagagtcactttttaatccccgatttgagcgcaatcaggcggctgatacgagaacaaaaaggagacttctcgctgcactcggcgtcgcgagcggcacaagtggctcgattggcagggagaaggggccgaatctttgaaacaggcgggcgcccacggtgtccacggagcgtggcaatcggggcgatggtttcgtcgagagggagtcccacgagatggcctaccatgtacgagtagccgtcgctaggtgatcgatctgtcctgagtagagatggtgctcgcgaaagacgtggggatcgacaccgaaggcggacgttgcctgcttctcacgttgcgatcttgcgagtcgtgaccgagaatggagacaaacggctcaaatgtcgaaccgttttaccccgtcatcgtcatgtgattactgcaatcccaccaccgatccgatacgatgtttggctgaaatcgagtttgagggcggtcgtgagtgtacgttgcctgcagtgcgtttcaggtttgttcggcgtgatcaatcgagggatgtacagcacgcgaaggagcaagccgacgagcaagccgacggatagcgttcttggggcgagtcgtggcaaatgtcattacggagcctcggttacgagatggagtgaggttttcagtcagagttctggttcgacaacatgtccatccgtcacaccagaagcacgcgcttggtagtcgaatctttctctagccggacaaatgcggttctaatcacaacaccggttggtgcctcagcatgcgtcaggttgagagtatcaatcgaagcgacacccggcattggttcctcaatcgacatgtaacacccgctaggtggttgaatgacttgctgttgtggacagtggcgatggtggagaggtttgacgaaaaggtcgaacgcttggacggaaacacgtcggcaaatcgttcggtttggctctctctgcgccaaaatcataaatgtgtgttggaattctttctcatgaacacgtcggcaaatcgttcggtttggctctctttgtgccagtattatatatgtgcattggatttctttctcatgaacacgtcggcaaatcgttcggtttggctctttttccgccagtattatatatgtgcattggatttctttctcatgaacacgtcggcaaatcgttcggtttggctctctttgcgccagtattatatatgtgcattggatttctttctcatgaacacgtcggcaaatcgttcggtttggctctttttccgccagtattatatatgtgcattggatttattttccatatggctcaccatagctcagttggtagagcgagggactgtaatggattgaataagtctatccctaggtcatgcgttcgactcgcattggtgagattactttttgcctcggggcgggcgcccttttttgatgtcgcggctgacgtctttttctttctcgcgccgggggtcgccatcggggtgtcgagcttttctctctcaaatatgtcgatgatggtcatatcgatgactttgactcatggctcgcacacgtagccatatcataccttctgacacggaccatgacgcaacaggaaaacctctttaaatcgatcgggcagctagctcaggacacggacgcacgacccgaggtcgacgacgacgatgttcgtctcgaggaaggaggcgagtttcaagaaggaggtgaacgcgaggtcgagcaggtcgagagtttgtgcatggagtgtcacgagcaggtgagagtcgagatcagaggtcgtcgaggcgggccgtcctacaggttcccggggctagatactctggacctgcacgacctgtttgagatgacgaatccgatcgaggctgacttgcctcgactctgtgctcagggtgtaaccaggatgctgttgaccagcatcccatactttcgagaggtcatcatcatgtcctttcgatgcgaacactgtggcaattccaacaccgagattcagagcgcgggggagatccagcgtgagtttgagagcgagcgtcgaccctgtgccacgactaaagcgccggcccggactttagccaagggctgcatctactcggtacacatcctcaacgccaaggacttgaaccgacagctcgtcaagtccaatacctgcacgatcaccatccccgagatcagcctgacgctaccggcttcgagaggacagctcacaaacgtcgaaggtctcgtcagcgacattgtccgggatctctcgctcgatcaacccgtacgcaagatcatggacccgaccacgcacgaaaagatcgaggcccttctcgaccgtctgcgagagtgtttggacgatgacaatgacgaggcgaccactggggaaaagcccgagaaaaagtttaccccttttaccctcaagttggatgaccctagcggcaactcgtacgtccagttttacggcaccaccagcgacgcccaatggagtctccgagcgtacaaccggacccgagagcaaaacgtttcgctcggtctggtcgccgaagaggaagaggcggcgacggcaccggccaccaaggagcccgtcggcgccatcgatgggacgaggccgagcatggtcgagcgggaagatggcaccgttgttcccgaagaggtattcagcttccccggagcgtgctccagttgcggacatcagatcgacaccctgatgcaacgggtcaacattcctcatttcaaggtgggtccgtgtgctctctgcagattgccgcgaagcaatgctgaccggtcgacactgtgccgcaggacattatcatcatgtcgaccaactgtgaatactgtgggtaccgggacaacgaggtcaagtcgggtggagccatcgcggacaaggggaaaaagattattctcaaggtggaagacgaagaggacctcagccgagacctcctcaaggtgaggcttgccggactcgtttgaccgctttttcgcaaccgtactgatgacatcggccccggacccagtccgaaacctgcggtcttgagattcccgagatcgacctggtcctacaacccggaacgctgggtggtcggttcaccaccatggagggcctgctccagcaagtctacgaggagcttagcaccaaggttttcaacacgggcggtggcgactcggcactcaccaacggcgaggacaagagcaactttgccaaattcctcggtagcctcaaagaggtcatggctgcctcgcgaccgttcaccttgatcctggacgacccggtggccaattcgtacttgcaaaacctttacgctcccgacgacgaccccaatatggagatcatcacgtacgagaggactcacgagcagaacgaggatctcggtatcaacgacatggtcttgaccgggtacgagaacgaacatcccgaggctgctactgacgtcgaggccaaggccgattagagcatagatgtggggcgaatacatcaacaaactgtagctatactcggaaacattcgattcgtacatttcaaacgatttcgcgaccgtgtcttcctcggcaatgcgaacgttgcgagcgtttgcccgtacagcatatttgccagagtggcaaaactaacggcatcgtcttggttcgagccgatgagacttcgagttggcagcagctgctacgcgagctttcgatcgacgaacaacccaacacagcacaatcgcgcatatgtgttatgacggcgaggtcggtgacacatcagaacatgcatagcgccattcctcttagcgactgactgcttgtacagcgatttcgtctcaaggtccagcccatctaagtgactgtgtccgaataaacccaaaattttacaaccacggaagaaaaaacccatcccccggccccagtgtgttcacttggtcttaatccgcttggccgcctcttccaatatcgacgtgatcacgctcatgtcgtgttcacctttgacaagccagccgttcaaggaggccttgcccatcagactatcgagccggagtcgaacgtcagacgagcccaaaccggtcagggcgtatatggtacacggaggaacatcccccctgtcttgctccaattggcgaatcttggtagtggccgtgagaccgtccaagactggcatcgaaacgtcggtgaaaatcaaatggggacgaaaagtgtcgtatcggtcgatcgcttgctgtccatccgctgcttcttgtattataggtgcgcaagggcatttcttcacggtcaacgacaagagctttcgattgacgagattgtcatccaccacaaggacacgcaatcgagtcttgtcgagcccgccgccagaacgcgaggcacattcttcgctcgcccccagtcgctctggcccaaggtcgccgggttcgtccaagcacgtctgaattagtttcctcttcatgcgcatcggagcgatcgacatcttgtccatcgatttgatcggcagcacaacctcgaaggtgctcccgttttgtcccttgtttggtctcaatgctaccgtgcccgacatccgttccaccaatgtcttggtaatgtgaagtccaaggcctgcacccacgctaaatgcattcgacttggtaaacggctcgtacatccgactggcgaattctggagagataccgatccccgtgtcgaccatgcgtatgacgacgcggctttgcgtttcgtccagagcgagcttcaaagtgatactgccgttgtgggtaaacttcatcgcattggttattccgtttatgagtattctacccacagcacaagaacatggtgagacgacgtctacgccttggatcgacttggcccggacgacgtacctctgataacctgcttcatcgatcacggcctgccaaggtcgatcctcgtgttcgagaaccagctcgacaggcgctgacccttgatatcgctgaagcgcgcacgtcgatatcatttcctctgcaatactagcgaggtcgatacgcttctcgttgccacccgaagtcctcagcgagtcaaagtctagcacgtcattcaacaacctttgtagcgtttgaccgctggattcggcgatcttggcgagcatggagacctctcccaagtcaccggcaatggcggccgttcgcaagagccgcaagctggtgatgattccgtgcatcggtgtccgtagctcgtgactgatagaggacaagaacgcagtctttgcgcggtccgtcgacttcatgtcggcctgtgctgcctgtgcacgaagtatcgagccaaaggtgctcatcgccgtctcgtcgctctccttaaaccgaggttggccctcggtacttagagcgatgatcatgaacaaagggctgctcatggcgtagaacggcaaggcgatatagtcctgcgtattgctaggaaagcacgactcgaatccggtcgggacagtcgcgggctgcctcgtccttggtgggtctatgagcgagctgccaagataatcgagaacatgccgaattccagcaccgtccgcgcccaagtcgaaccgaggagcgtcccctgagacgggatattctgctatcacctgcaccgagtcaacagctcgcgcatccgagacgaagcgtgtctccctgtgcggctcagactttgacaagcccgagcccggcagatcagcgagtgaaagcccccttagggtagtttgaaatcgtaacacttgcgatcattttgacggatcgtaggtctatgatacacgtcgctgccgcctgcaacaagctcacggacatcctatgacaggcgtcccgtgccatctccttgaaatcgatgattcccgctttagaccgtttgttgggctttgcatcccggtccgtacgggatctcgggatggagctgggtttcacttcatttccatcctgtgagacggttttcgacgggactggaatcgggctcgtcccgttcgaagcgtccagtgcgtcccgtatgtaccttccgacttcccgattcgtcctagccacctttgtccgacggtgtccttcccacgtggctttcagctgggtctgtaggttctgtgtgacttggcggacgactttctgttgctgttccgtcaagacttcgggcgcgtcctcgatgaagcacaggttgagcgttcctatcccgatccactcttccgaaccggtatcgcctggcagcaaggacgggtcgagagggagcgcgacgacgctagcggtgtacgtcctgaacccagccaatctgaacgggtttcgaatatacctccaatcctgttcgaggttcgtatggaacaacttgtgccccgcacccagaacggcatgcccgcataggctgtcctcggaggggatccggacgccgacgtacacgttgtacttttctttgacgctctcgggtccggctacggcgtagtgatattgaagatcacccttgaagagcgagaacgtgcacaagacgcccgggaagaatgcagagatcaggtcggtcgacgcctgtaggttccgcatctgttggtccccggaaatgtcatactcagccaagacgcggtttcgctggtcctcttgtgccgatcgaggtggaggtagatacagattctcgcagtagaattgtctgactcgacgagcggtcgcttcgtccacatgggacgaagtgtagatggccgtgttgacgactttgtcctcggccaaaggactaccctttgccgtttgtcgtcgctgtagtaactcttcggtaagcggtggcatggccgcgccgtccgctttgatacccttggcatactctcggagaaagtccatccaggcagcgatactctcggcatcagaccctgcgacagactccatggtgcggaacgtttctgtggagagtcgaggtggatgatccaaggtcaaggcgatctagagctcccggccatggcatgtcggcgttgaagattgtgggatcgacattggattgaaaccgggaatatatgtacatataaccgagtcgttggtgctgtgtgcaaccagcgaatgatggtggagtgatgtaagtaaagtcacgacaagcattgaccaagataaagagtccggagagacatgcatgtgacgacgctttaccgtgggcgagttgtgtgtgtgatcacgtgacggtcgacatgaaactcgggcggtaagtcatcccagtgatccagtgactagctgatagctaactgggtactaactggaacactcgggtcatctcattcgtgaatgatattccggcaaatcccgtctctttccgattctcaacgtcgatctatacaacttcgatgtcgcatacaatctcaactgcaacgggtcatatcgcatcaaagcactcgatcgaaatgccgctacaactctggcaataatgatattccagaaaaccgcttgtcccgatctcttccgcgtcgcttgtcgctcgatgcaacgaggcggccgccgactcaagccatctctcgatgctctatgtaggcctttgtcttctcaacgtcggtttcgttcgtatcgtcgttctcagccgtgacgtcggacgtttcccgcaaggcaggaatgtcggtcgagcccatcttccggagaggtatgtcgtgctcaaacaaccagtcgatctcgtccatactcttgttcttcaggtccggcaagaggctgtacagaggtatagttgagtcctctgacgacgtacgagtgtactttgaaaagactcacaaccaaagccaaacaagcgcgatcaaggagatgcttccgtctgtctcgcaaaaagacgagaaccaagggtcagtatttttgcagctctcgacacctcggagctctcgcttacagatgaatccgatctgtccacctagagcttcttgaatcggcgcagtcgcaccggcagtaattgcttgcacggactggagagaaaccagaatcttgttacctcttaatcatctcgccacgtacgacctggatcagaagggtactcactgaagcgcagacgaccgacatcgcataggtcttgtctctcacgtattgcgcggggacttcggtaccgacgatgacgggaccactagcccagcccagggtataaccgagtacccacaaaaagactgagcgtgaagatggacgagggtctgagcaagcctggtcatctacggatatcaatgcggaagcgaagggcttacttgcgaatatacagacgtcagcctttgaaccgatcggagctggagtcttggtagtaatgccagcgaggagcaacatggcgattcccatggctaaagtcgatcctataagtagtacacgcctgccgaggaaatcctgggcaaagaccgagaggatgaccacgaaaacgatcatgacattgatgtagatgttgagctgcaatgggttcttgatcccgatctggacgaagaagaggaccaagtaactggtgatgaagctgaacccttgagcgggtccgaaactggagactccggtggcgatatgggtacgcagcgcgttgcggctcttgaagacatccctccaagtacccttgacggcgcacgcctcactggctatggattcccgcatctcggcaaactccgaggtgatcgcttccggagagctcctggtcctgacatatttgagcgagactagcgcttcgtctgagcgacctcttgctagaagcctgcaagcgattctcatcacgcagtgctctaggaatttcagtagaggtcgggcttaccatcggggggactctggaaggaatcgggccactaccaggaggatgataggcaagggtaattgcaagccagtctaacaacaaacgcaaccgtcgtcagtcgtggcccttacgccgagcatggtatttccactcgtgtgaaactgaccggaagaagccaaacgatctggcctgctttggtgctcacgccgtacatcacgcacgcggccaagaggcttcccaagaccactgtccaggctacaattccgaccagagctccgcgaatcgatttcggtgccagctcggcaatgtaaaggggcacggaaacgagcagaccaccacctgcggctgcaacgatgaatttgctagatgggataccgaatcataagctttgatgggtgcgacaggttcggaagcttgcgaactcaccccattaccatctgccagaagcgatacccattgacactgcttgtcatctgcagtacggtcgccaggataaaggtaatggccgtctacaagacggttcaagggatcaataacaatcttgcagaagcagtgttatcacgtcaggtatcttaccacattgagaggcatgactctaccatatctttctgccaattggccgccggcaagacctccaatctgcacactcaagcggggtttagccgtgttcagagaaatcactacgtcggaagatgctagcatccgagagcagctcaccagctggaagacataagggaacgaagtgctgatggactgttccatggtgctgactgttctgtaagacaatccggtagggagagtcacggttcctccaccgaatcgccccgcgaattgcggcaaggccatcattacgctccaccaacctagagcagagccatcccgaacttgagcacatccgcgtgaccaagcgtgtagaagagagctactcactattatcgtagcccaactgtaaaccgccaaagcctgtgaacagggcaatgaagaggagaggcccggtgatgtcattcttgaaagcggaaagtttgctgaggaccatgtttctggtgaaaaacctttatggtcgcgagtataaagatgcgatgttggtcggcaccgatgaatctctggttacatcgctcacacaatccatgtcctttatacatcagtattgaaaggtcgaaccgcttatcgaaccattgaaccgccaagacgatgtaagcgagtctcatcccggtcactgatcggtgatgaaacgaggtaccaaatcgcctattcaatctgcctccgaactgccgaaacgccgatccgtggatttaaccgaagagccagatcaagtctcccgccttgcccgcggtgatgcccggacgtcattcagtgcgtacggggggtgtataaacaacggctggcgtattgagctaggactcacgcaaagctggaaatggatagacaagcgtacaattcaaatcgaagcctagactcgacatggtatcattcgcggccagagctatagaagccggtatctggatgtgggcgtccggcttgaggaagaagacggaagcggaatccgtacaaatagtcatcgaacagacggagaaaaacgcagctgccgtggtccttcccagcagaatgaagtacacacagaaccaagagcaattaagtggccatcaggaatggcaggtgttccacttggaaccgaaatcctcggctagaacggacagcgtagtggtcttctggcacggaggcggcttcgtcaataacgtgggccaaacctccagactcattttgatagcggattctgatcaaagcaatgtcttgtgcggtcccaggttgacaagttgcatcacgttgccattcggaaatttaccgagaccttcggtcttcccttgattctgcctatctatacgctcgctcctagggctaccggcaaggagttcgtcatggccgctgttgacctcctggcacgtctacaatgcgactcgcgatatcgaggcaaaaggatcatcctcgtcggagattcagctggggggtacctcagcgcccatcttttcgcagtgctcacaaatatggcatgcggatctggcgatttcacctacgctggccaagatcaattactggcatccatcggtctggacaagatacgagagacaaggcggttaatcgatactgtctttctattttccgccatgacagagagttaccctcccgatgaagataccgaagttgagaaagtcgtaggtctctctcggcgagattgctaatgcgcgaccgctaacgctgcagagcccaggatccagcacttcgactgacgatgctccggacattcgctcgcatttgggcttatggcatcaacgcgtttcccagccaagacctgcaagtatcccccgaaatcgcgagaatacaacaatacgatgcccatccgctacaccatgcggcgcattcgcccagttcaggagtagatgctctggcgcgttatcacgagctggggattggtggtcgagctccagcgattatacagttttgtgggacacatgacgttctcctccccggcaacgctcgttatcaccaaaaactgcagcaactaggcagtgaagtcgtagaaactcaacttcatatcgtaagcttgatgcccattcaaggatgtcagggaacaaccgactgataagtaacgcgttgtggtgacattatggacatgcagtatcctggtctctttcacgtctttcagggcttggaattcctgccagaatcgaaggatgtgtggaacaaagtaggacaggtcctccaagagaggtccgatatagaccttgtgtaatatgcatcttgattcaaatggctatgtacaaagtgatcagcgacgtatgccgtccgccgggcaagaaccaaatgcaaagctgttgggcagacgagaatcgtccgtcctttcctgctgatggatggacgatcgcggtaacggaaagcgacggaagcagatcctcagccacgaagttatagccgttgctatagccgtactcaggttgaagcatagtcgtgactatccggccgttgcgtgctcatgaccgcatctttgaatacgttgtaaccggtgacgtgctgagcgttgtcccgctcggaattctggccataaacccgtagaccctgaagattcttccaccattaatcaacagccacgctcattgcctcgacagcaaatcccgatgagtcccgatcgatcgaccggcaagcgatcggtgttgcgacctcgacgcgcgtgagccaatttggaggtcgagattacacctccagaagctgatcagatctcgacgatctcgctgcgacggacgctggtaaattcctgagccttgtagttgtgtagagtgtaggcagctgaaagtgagtaaggataaactgagcgggtgtcttcctttttgatgtgactgattcggactacaggtcaagtgccagcctgggtcgaaagacgattgcgatcgatcgccctgtcaccgttgcgagacctacgaattgcattgcgagtatgtgggcaggaaaagacggacaaagagatctgatccgcaggcagagtgtgtaacaaagatctgtccacaagcggtctgccgtgatcgctaatggtcgacttggatttccagcttctcccggacagcgccagatgccgctgggccggtccgtgaactgggatctctacccgttacagtcgcctattcagatctcgaagaccgtcatgtcggaagggaggccgcgacttccggatcaggcttccgagcctttgattcacagccgaagatggatcgggtcgaacctttgcaagaggatatcgagggaagtggagatttctcatcttatggaacatcccatcaggaacgaagcgaggacggtgtagctcctcctacagcagtgcaacgcgtatctcaagactcagccccaacatatgcggctgatactgtgtcaatcgaaaggcaagacgcccacagtgtacagcgggccctgcctttccagaccgcttcgagctgggtcatggctcaagctcccgcacctatcaatgagaaggggagtcccgctccggatttcccttacgacacgggcgtggtgacgcgatcgcacgatctcgtctcccgcttggatcctgtgacgcaacagtctacatctatgggaagcacggcgccggagagcgctgtcagccagcatggcagcgggtcaggcgatcccatctaccttgaactggtcacgatagcggaagccgagtttctgtttgccaagtaagttggttgtcagagacgaccgtttcttcagccgtcaattacagaagatgcttatatcaccgggagaacaggttcatgaccaatctagcgccgttaatagggtcatttgatcctggatgcaagtccctatttctgctaatattcgatgcgcctgttgagatctgacttcgtgctcagattacacttttttgcatgtcaagagaaggtctggggcgctgctctccgccatatgctttgcagcagcaagatttttcttgcccgaaagcgccgaccggctctggaatcactcccggagtattctaggccgagcggtcatcaacagcgagtgcagtcttgacctgatccagatgatttgtgtcatggtctactggaaaaagcccaccgagaaatcagcatggctcgacactggcatcgcaattcgtatggctcagaagctcgggtatcatgacgacgactcgcgtcgggcaaccctaaagcagaacggccagagtgcattcctggaacaggcggtaagcgcagacaatagcagacatgagtgatgcgattctcgatcaatcgtcccgctgatacttgctttggcttggtcacaaagaacatcgatcgtacatggtactgtaagcccgcacggaagaccttgtccacgaagtccctctgatgtcgttgttctgcctaaaggtctttactgtcagtaattctctcaatctagggcttttccagcatccgaaatgaaacattacttttacgatcctgcaggtctcgacaagacgtgagtctctgtagggtgtatttgtgtactcgtgtttacctaccaatcactctaggtggaggtgagtacaaggagctataggtccaccaagttcgaaccaggctcatcgttactccagcgaattgatcttcgggttaccgagcatgatcactacggatgagtcccggcaaatggaagcttgggcgatctccatgtcggagctcggacgtcgcgaggacttgcagttggcctgcagcgcatcgtgagtagctggaggggacgatctcataggtatgcactacaagcgaaatccgtttcagcttcggacccaccctcaaggccttgaagctagcccgagcatctatctcagaacgcgaccgcttctctacgcctaagatcctatcgatacgaatggcagaggaggccctcctcagtcaccgtcgacgttggttctccatcgatggtcacgggctctcggatcgactgacgcccgcgactgtcgcattatgcgagctacactctgctttggcgtggtgtgagattcgattgctcatatatgactcctggcgaactgccgattcgaggcaagaagtcctggcagcttgggtggtagcggttgaaaagaccagggcggtggcgacagcaggccaccttccgtactggtcagatggctttgtgatttcgctatctcatctcggagcgctggtatacaaggtgagagatactctggaagtgtgtatttgagaggggcgaggctcatctcgaacgttgcagttgatcagaaaaggatcgtccttggaaagaggaatggcgcgagacagtttcgcggatatctacgacatctgcaaagcatcgactagaggcctcgtcggttctccctacgtgcatgtggctagatgtttcggtcacttgcgggagtttttagaccagtctttcaacgcgggcgttgagaagtcgcaacaagtcatgttagaggacatgttccgcatggtgggtcacccctgaggaagacctggaagtgtgtagaggcgtcttctcacgttgaaagtcattggtccgttattgcaggaggatatcggcacggcagacttgcagttttggcaggagaatctaggtgatcaattttggtgcgtccgccgaagacttccatcaagcgttatacctaaataagacttacgctcgcagggattcgatattcgaacccggtgaagtgggatcaatctccttcgatgaaatgtcacaaaggtactgagtgcgatgagctatgaaactagcgtacatccggtagtctcgatggtaagaattacgatgtaccgccgtttcagaaggctcgggcgcgtacaacccgcagattgcaatacctgtcgattggcatcttggaacgaacacggaaacgtagggccacgcggtctacgccagatggacaggggtgcgcttgattgaacgaagtgaaaggcaagagaatgtggcgtgagagagcggcgtagttaaagtctaggcagtctcgcgtgtggcgtcagctgaagcagatgtcttcagaacttccatggtctgtttgaggaagtggtgtttgaaatacgactggcaaagtctcagcgggcaccaaccaagagcgccggcagatgatcgttccataggcattggcaaacgtatgctggacatattcctctggtctcgaactaccagctttgaaacccagccgaccgatcctcgaccagttgtggccacataccgtctttgccatcgccacgcctcctgaccgagcatggttaggaatgatgccatgttgtgatgtccaaatgtcactcgcattccttgtatcgcaataatacatcagtccgaagccgcacaacccccttcgacgatcaattcgtctacgctcctagcacgaacgtcaggaaactttttgttcagagcgtacgccgggtcgacctcgaacacgctccgctcaaacatcaacccgaacgaggcgaacatttcctggaggtcctttttgggaaagtacccgtacgcttccttgtggcagggcaactcggtgatctggccactttcgagcttgttcaccgaatcgtaggtcacgtcgaatctggtacccttggctttttccagcttggacacgagctggttcagcgtcattcgttgtccgatgacgttgctctccctctcccacttgtccgaagaggacaggaggtgtgggatgaactttgctacgtcggtcgtatgcgtaaacaccgagtagacgtcccctgaaccagggatcccggcgacgtgattccgagcgtcgattgcaggggcgaggttacggtcgaatcgagtcttgacaccaggtccgacgaagtaatcggcaaagtacccgttgtgcaccgatgtccactcgagagacatgttttcgagtgcttgtaacactttgatacgttcggcgatgaagggtgaccattcggcgaccctaccattcgagcgtccctcaagtcgtcagagtcgaccccgcatgctccgcttgacgaaccgatcacttactcgggctggcactggcatccccagatagcggggatgaaccgcctcgtcaccctactccgctcagccgcctcgctcaacgagatttctggacctggaccatcgtcactctgtacggtggagaggaccgtgtcgatctcgttgtcttccaggattttgaccagggcgtccgggtcattatagtctacagggaggatcttggctccgagttccttctccttgctcggatccgcctgcgtgagcaacagacgggaccgggcgagtagtttaggtcagtcggtctcgccaggcaaagccgcagcaagaaacatgttcaagctggctctcctggacttgccttgcgaccgagcacgaacactcgaaatcccccgttcgagaccaacgcttcgacaatcgtccttcccaggtttcctgttcctccggctacagcgacgactgaggacgccgaggaggaggacatgtttgatcttgtggatactcgacgaggctctgacaggctggtaagatgttgtcgaacgccgagtttcgtgaccgctcaggttcagcggggaagtcaagttgtattcgcgctgagggtcctctcagcgtgatcgtttgatgttctgggtcgcacgctttaccgaatcgagctggttctcatatacatagtacgtagtagtctgtgatcatctagatatggctatgggcgagggacccgggttacaagctgacgtcccgggggttcactctgagcgctgatcgtcattgatggtcgcggatgcaaaaacctcgcacagtcgccggcctgtctgttctttctcgaaccaaagtcaaatctgaacccctggctggcatccgcggtgcggccctgcatgaaatccacaccaagccaaaaaccgttgccctgcaattctattgctttctctctctgcggcgctaaatgaattggtttcccctatcaaatcgaccacgaccgacgatcttttaccgctggccgctcgcctctagttctcgacgcttcaatctgactccgtgaattcgaaatgagacgacagcgacccgcgatccgggacctaaggcagggaggaagggacacggggaattcaaggggaagtgagatctcagggggtcacgagatttcgagcgtcggtcgatgagattggccgatccggaccggttggataacatgttgcatgttgatagtgtaggaggtggtggatttggtggggcgataggggaagagcgagatagcacgaattttcgataacaacgagggagtttgtttcacgggctgatagcgatgtgatcttgtggtctcgtggctgtggggcacattctctcggtcgaacatgacgatgaaagtgtgcgagaggtgcgagatatgtcgatacgagcgatcagtagtgctcagggatcaggccgtgcgcaggacgccgtaacacaccaccattgcactgtctgtctgccttttcctggccgacctcggcgtcatcagccttgctggtggcgaccactttgcttgagggtgtggctgtgacgagccgagccgacgactccgagagagagagagagagtgggattcgaaatcggaagcggattgacttgaaatctattcaaactgacagccaatgaggggatgacggatgctctcttgccttctttcgcgcgcgccaaaagttgcttctggggtcgaatggcgtggcgtcgcagcggggaaggcaggccaggccaggagtgactcggacgaggcggggtggggggaggagggacaggaccttcgtagctcccctctacctcccccacgacgacacgacgacctggtcgttctcgctatcgctcttcccccgtctgcccttcccttggcctttgcccattcccacacactttactctaccctctgtcactgcctccctaggccttgctctgtgtatatcacccaattcgctcagaccaacgaccgactcgcacctacccattcccgaacgctcttcttctctgacttcaaaccacatccatccccgttcagaaactcgcccgtctttctcctttcccatccccgtctctctcgtctctccggtctcgtctggtcttcatctcgtcttcatctcgtcttggtgagtcctcgccttgcgtcgcttttgggaacaagggcgtttttcgggtcggacgactaggtcagggaaggggaaacgagtttcgacgtcaaacatcctttgcggatggtgtcgaccgactcgcctcggtattagtcgaaagagtcgtcctctttcgacgtgcccgaggtgtctcatcaaacatgattccccttgagtccaccccgggctggggatcgttgatgtggatccctcgtctcgaccgaaacgccctttcgacccatttcccctcacgcaaacattctcgattggaaccaaaactgaccgactttcaaacgctttccatctcctccgtttcactcgcttggccttatctcggtcgaccttcttgactcgaactctcctttgtggctggatcatatcgccctcggtgcgctttgaaacgtctttgattgatccctttgatcggattccttatctctaccctcgatcaaccaatcgacacattcacactacgaccatcaccactattactgccctttgctaccgcatcattgcgacctcgttgaaatgacatcttcaaaccccgccttatcaacctgatcattcccgactcgacccgaaaacacatttatatatatactcgatccggactcgacttgacattgatcgtcaatcgacctaccacaagcagacaaatcacccttgtcaatacacatctacactctctcagagtcttcacccgtctttccctcgaaggatttaaaccgagaaacccatataaatcaaacaaggtgagtctgatacgtaatcacgcgacatggtcgtctttctcgccgatcgtgctgatcttgggtcctggtgattgttgggtgatactacagatggtcgtccctaccaagcgtgtcgatttgtggcaaccgtacatgaacctgccccaaggtggcaaggtcatggccgagtgtgagtaccgggtcgtctgtcgcccaggcctgctccctcctccatgtatgcatcgcgtctgacctagcgcactcgatacagacatctggatcgatggtaccggtggtatgcgatgcaagaccatgacccttcccggcaaggtctcggacgtcaaggagttgaaggagtggaactttgatggatcttccaccaagcaggcccccggacacgactctgatgtcttcctcgtgcgtgcagactacctcgccggatgccggatgacgttatggagtcgatcgctcatcccccttttgttcgatttcgctcccgagtagaggccttgtgccatcttccccgaccctttccgaggtggagacaacatcttggtcctctgtgcctgttacttccccgacggtacccccgccaccaacaaccacaggcacttgtgtgagaagaacatgaacttggccaaggaggtgcgtttctgtcgacagtcgtctacgtgtcgattcgcggaggggactgaccccgtcgcatgactctcccacagcacgagccctggttcggactcgagcaagagtacaccttgttcgactctgacggtcagccgtacggttggcccaagggtgggttccccgccccccagggtccctactactgtggtgtcggaaccggcaaggttttcgcccgtgatttcatcgaggctcactacgtaagcgagagcggcccgtccctctacgctgtttcgtgattcgagacggaaacactcaccccgcctctacgcatctatgacgcatatcctcttcccccctatccccgcgcgcgcgttttcttgacaaacgatagcgtgcttgcctctacgctggaatcaagatctccggtatcaacgccgaggtcatgcccgcccagtgggagttccaggtcggaccctgtgagggtatcgagatgggtgaccacctctggatgtccaggttcctcttgttgaggattggtgaagagtggggtatcaccgtgagtctagcttccgaggtctttcactccgcctggacttgccagctgatcacgagttccaccatttacgcttcgcgtccagccctcgttccaccccaagcccttgaccgagggagagtggaacggtgctggttgccacaccaactactctaccaacgagacccgtgccgagggcggtatcaaggccatccacgagtacgtcgagaagctctccaagaggcacttgcagcacatcgaggtctacggcgaggacaacgagaagcgtcttaccggaaagcacgagactgccagcgccacaacgtttaccgccggtgtttcgggtgagtgcacgacatggcgatggtcctgcgcagaaaagagtcaccttgaattgaccatgcgcttcgtacgacagatcgtggtgcctcgatccgaattccccgatcggtggatatcgagggcaagggatacctcgaagaccgtcgacccgcttccaacattgacccttacagggtctgctccgtcatggtcgagaccacccttatcctctaagtggtgggctcggcccgggtcggccggactggttgtgcatgcgatcgcccctcacacatctttcggggcaggtccgtacgcctggacgatcggttgatccacgatcgacgatcggttgcacgacgatctcgttatttcctctcgcttgtggtctctgttccccctctgttccattagtatccatatatcacacaaaccaaatcgaatgacatgccttcagaagagagccggtagtgatggtcgcgaccccagcgacacgtgttgcccctgacacttgccgtagctcgaggactctcgatgactacggtactacttctgtgaagtcctatcggcgatcgcctacgagctgtgtgtgctaggaaatcgcgtgatgaacgaacgtaaggagtagttgaaacaacatctcgttcatgctgcttttctgtcagctacctcccactctctcttcgtatgaaaagggtctacaaagttggctcgatcgtgcttggatcctccgaccctccgaaactaccgaaaaagcagagccgcttgtcatctaggagatgcagcgcgatgaagcgttccaacctcaactcatcgactcgggaatcgccattcgttgcgatgcggcggatgagaccccgtccatccgaccgttgatagccaaacgcaaggcggtcaacccgttcgccaaaaagctaccctcggccaacgaggaatctctgtctgccgagtctggatcgatcgaagatgatgtcatgttcaagaggtcatcgatattgccggtccagaggcggagagttccactcgaaaaggccgccagtcctcgcaaggcgacaatcgacactccgaacgggtccttggatgcacccttccaagaaaaagtagttgaatcgggtcccagtacggagcggaggaccgacaaaaagtggaggttgttatggagaggtgctcttgaagttggtcaagagggttatcgactagaaggtgggctcgccaatccaccgaatatcgtctgtggatcctgaccgactgggactggactgatcattcaggtatagcgtttgtcgctcaattatctttttcgtcgagcaacccagtgcctgtacatctcctcacatctactccggaacggcccaatttggcccgcatggtcacgcccgagaacacctcgttgtcacaagtagagaaggacaggatccgtgcctctccctttcggacaccaatcggcaaggacacagacctctgcctcagtctcgagagtatgcgagggagaaaagcgctgaaagtgcgagggatcgaggagctggatgatgatgaaatcgaggagggacatctcgacgatggtgtcaaagtgtgagcacctttgacttttcatcagcctgaccgagttcacggccgacgtgcgatccggttcttcagccatatcaatcctcaatccgtagctctgcaaaagttggtcacgaccttgctgtacccctcggacggacatgggttcaactacaagggccgcacgagagcggctctgattatcgggctcggagacgacgatgcgagtaggtctgaaccgagtttgcccttgcgatatcccacggaagctgatcgagctgcttcagacgtttcgacgaacaagacgacgtttctgttgttcggacagactagaatagaaggcggtgtcgagcatggctcgagggagatggagctgtttgcggcgagacgcaaggttcgtcttccacctgggagagacgtcgtgcgaccgggagatcctttacctcgaggtatgtccaagagatggctacaaccgttcggggcttgtcctttgctgaggtggttctcgtaccgtagacaccgtccttcctccagcaactgctcgccgagacgccttttcacggcgctcgacttcccttttttctcatcgtggtttcagccgtgagccgtcacagctcaacatttacgctcctccctctctcggtcctcagaagaacgacgaaccgaaacccacggacaaggtcagaaagactacacccggtcggcgaggcgagaagaggaaaaaatccgtgatcgacgagagcgcacatatcgatgcgaggagcaagaaggttgggcgggtcttgatgccgagtttgagtttgccggatatacatcctactagggcgggacaaggctcatcccaatcgaacggtctacgttcgaaggacgaagtgtcgggggtttctaagtcggcgtcgacgtcatcgttaattggagatgcagacgtcgaaagcgttctcagccccaccgagcagaagaacaagagtgtaagcatgaaagattcgtattgtggtgctcgagagtacgtcgttgaagaacctcgtccttcgtatctcttagaccatcaagaagcgcctgtggcagatgatggaatctcgtggggtgcccagatcggacgaccggttcaatgacatattcagcatgaccaacagaggtactgcatttgctctggtaggtggctagatgtctacgtttaccggatgatcatttcgcctgacccacagccgctttccgatcatcagcggcatcattttgctacagcgtacgcctctcacgaacagattgatcgggtgctttcgaggcacctcgacatgtatatattggacgatcaaggcgtctccgatagaccgaacgccttgggatcgtgacatgacgaatctcgaaactgatacgatacaggtcacggacgtacgcgcccagcatcgactgtcatcaagtcgtgcactggcagtcggaatctgtgcccacatcgacaagtcctgttctagagcccatcaatatgaggccgtcgatgtgtgtgaaagacggttcagagttgacatgaacgaggaggaggttgcacggtcgagactgtgcctgagctatatatcctgcctgccccgcttcccgcgcgtcatctcatgggctcggccatgaccttccttggcttgcttccccttctcctctatctatcatcatccactcattctacttcaacactcgtcgacggacatgaactggagtcggtctttgtatgatgcgccaagctacctatagtagtaggctcaataccatcccagcagtcattgcataatcctagacaaacaggtctgacccctcgaagccctaagctcgattcattcgagaccttgggactttctgggactgcatcgcaatggagcatcccctttcgtctacagctgccttttcggaggcatctgaccggggacaagtcgagcaggataatgagcgtatagcaacacctttggatggcgaactgatgggctctggaccatgggcagattctcggatggccgaacgaagctcgttccttttcgatagtaacaccgaagagactccgccatacgactatcagacgaggttgactcggctactgaacgacgacgatgacatcggccaagaacgagaactcaatcatgagtggttggatcacggtcgggagcagctggaactcgatcaaaactccaaaagccaagtgctcggttatttcgacgattctagcaggaacagcccgtcgtcatgggctcgaggcgattatcaagacaatcccactacacctgtaagccgttacatcgatggaggtcaaaaaaatttctcaaaaccaactgttcttctacgcgatacagcctcaaaacccgctgccccagagcccttcgattctcgcgaaccctgcagatacctggaagcgtactggccatgaattagactcccccgtcagatctacataccgccggccttcctatctacgtgggtcatgatgatcacggcggcatgcgtctcagtaactgacgacgatctcgtgaatcagaccccagtatctcccggttgagagcgcatgacagaaaggtctcgacgtcctcggctggcagcaatgcgaatccatttggtttatctccatccaagctcggtcaagatcgagcaccgtcgacagcgagtcggcgctcggtcgtcagtcgcagatcatcgacgatggggccgctcgtctcaaacgacctcttagaagaggctcacgatctggacaaggagagcggaagagcttcttccgcatacggcgcggaaagcgttgccagcggcttgcccatacaagcagaggaataccgcaaccgatcggcctttgcgtttcaaactttacggactgctaccgatatcctctggccgccttcgggggatggaaggcggatgccgccgatcccccggtctggaatctttggacgatccgatgggccagtcaagaagaaacgcttcagtatcgccagcgctgtaagcggtcgaggagtcgaagagtctgtgacttcacagctacaggacaaggatagaggcaggcctgtcgtcctcgacgtgaagggtgtcatcgccgtcggtacagatactggctgggtcatcgtcttcgactttaagcaggaggcgcaatgtatttgcggcatggaatcaatcgcgcaagaatgcggaccagtgaccgctctgactgtcagcccggatggcacgttcgtcgctgtcggacatgtgaacggtaacgtttacctttacgatctcaacaaccctggtcgacctgcgaggtccgccttggcactctcatcagaagcactcgtatccggtcgcaaagagggacatctggtcggcacgaggattgtcgacatcgactttgtaggcaaacggcacacggcgattgtcacctcggatgaggcaggccgagcgttctggtggagcctgggccgcgtgatgggtgttgagagcaatgacgtcgtccgactgctcggaggcttagcggatggatcgaccgataagatcttgactatgggtagcggagcttctacgcctgacatcgacgctttcggtccgaaaggccgcctgacaagactcaaaggcagaggatccacgttatttgcgggcagagtcttgcctgccggcaaggtcgaacacaaatcagacacttacctcttgacggcatttcttacgccatcaaagatggtcgtggttggcttgaaaccaacgccacggatctggttcaaacgatccagaggtctagaaggaggagacaaggcgaagtctgtcgggtgcgtcgcttggctacctgctgacgttcggacacgataccaagaggaggaagatgcggatggcgcaacagatggtgaagctgcagtcacgatggaccccatacttgcgttctcatggggaaacagcctaagattggttcgcgtgaggagcagcacgaatgccgaccaggaagctcgaactgtagcattcgaccctatcctgcaattgagagaagatcaaccgattctggccgtcaattggctaaattccgaggcgagtcatctccatggtccaaaatcaagaatgcaggctaatactcgcgtgtcacctgcagcatcttttgatcgccacctcagtccacctgtcgctactaaacgttcaggacgggagacgggttgagcacagccaatattcaatgttgagccgtctgagctgggacccaaattcacgccaatattctgagcttgctagtcggttgcgcacgcacaagggaaaaattttcatgcttgttagttgatgcagcgcgattcggcttcgcctctcatcagctataattggcttaccgaacaaaatattggcgattgcaggctgaaacagaccttcgagctggatcgctgcttttatgggccgataggatactcgcattgtgccacgcgggcgatttcctgtcggcgatacagctcgcagtagcctattacagcggaacggctgctgggaacacaataggactaccgagcgatcctttgggcaggagaaaaatcctgaaagctagggctctttcgctcatgggatcatctctagcgtacgccttttcgcaggatcgtttgaccgatggaacgtatgatagtcccgacgggcgaggagtggatctgactcctctctttgagggtctagccgacacctgtctccaaagctgcctcatcatcgacgaagccgcgttcgcatacgaagatgtttatgaagcataccagcgagctggtattcaaaacatctttttgacaaagctggagaagatactcctcgaaacccgtctgaacggtataccgcccaatcttgtccaggcgttgataaaaatgcacgatgacgccggcgcttacaaaaaagctgaagatctgatctggcatgttgaccctacatcgctggacatcaatcaggcaatcaccctatgcgaaaagaaccatctatgggacgcatacacttatgtctacaaccagtgcatgctggactacatcacacctctcctgaagttcatcagcttgatgcgaccagcgagcgttgagttggagccggtcagcgtagagcatcttcctcaagcctataccctgtttcattatctcgaaaccgttttaatgggctgtgaataccccgatggccgcaaactaccagacacccaggctcatcaagctcgcgaaacagtatatggatgtttgctctcagcccgggaccccctctcactgcaaagccgatccacggtcggcctggaagttggaacattcccagtcttgcgaaccatccttcactatgatacagaggcgcttcttcatgtcctcgacattggcttcgaggatgcgtacctgaatgaaccacaaacattcacctctcccagtcggcaggctatcgtggatgctctaatcgaggtcatgcgcccggctgattatccgatcggggatatctcatttatgcacatcttcgtggcgcgcaacctacccaagtaccctcaattcatcagactctcaccaaagattaatcgagaaattctgtttagtcttgcacgtgatccagacatgacgactagggaagaccgccaattagctgcagagcatttgctctcggtttacatgccccctcagattgaggaacggagggctgagtttcaacatgcgcaattccatcgcatccttagactggattacgccaaaaccggagaatggaatcatgtcattcaatgtataatcaacgatctgaatctcgagaaggaggaggtcttcgaggcgttgcgggaatccctgactacatctgcatccaagacggcatgggcagcactgcgagataacctccaacaaatgctggccatcagtgtgcccctcacggcacgtctcttggacgatcatgcgtctgcagcgcataccgaggccttggcgattcttcggcccacgccaatcaaacacttcgcgtatctcggagcgttgttgcagcctgagatgctcgatgcagatgatactggtatatgcgtccggcctcaaatgtcgccctcgactaatctgagccaatcgagcgtgcaagactaccttcgtctactttgccagatggcaccccagcagcttttgatgttcttgcagaaccatcaagtctcgatcgatttgacaatggcgatcgagacgtgtgatcaacagctagcgaagccggcggtcatctgggccatggacgccattggtaatgcggctggcgccatagaaaagctcaatgagtaccttgtggccgagagcgctccaccctacaccattgaggactacgaagagcgagattccctggcgctcgatatgggctctcggctggaaaaaattcgcgaactcgtcaaggctggtattctagtttgtttacgcgcggagaaggcagatgaagaccgaacatcaacggagaatctttggtttgatcttctggcccaaatgatccgaacggctcagcatgttcttcaatatgcaggcgagggtacagagtcccaagaagcgagtgatgaggcgcagggaaatggtgcatcggtcctggttgcgacattgcggcagtctatccaagacacgctagccgcacttatctcgagctcggcttcttcgacactctccttccctcgactgtttcggaggctagtacaggccgcagggacaggtgatgatgtcgattcgacgtcggtttattcggaattccgcctgatcctggtcagtatgcttaacacgtatcacagcgaggaggacatgcttgtcttggtcactaaattggtacaaggtgacgtcttcaaatgtatgacggaaatggttgacagccggaagacaggatggcgtgcgcacagcttggcatgtcacatttgcagggggcatttcgaaaatgcaaaagaaggcgacttggcggtggcggccggagcggacctaatttgcatccctaggttgggtttgccttatcattgggcatgtaacaagcgttcagagacaatcaaggggttcgcttgacatgtcgcctctcgcgttggcgctattgttgatcggaatataatgtccacacattcgggctagcagcggtttgactagtcttctgaacttttccctcgactgatcttcttatgcaattctgtcggtatcgaacccccacggcgtcacggcctcttggggtaatctagggatgtcttcttgaatcctcttgcagagatcatgaaagcacttgttctcgaggctatgcatgtgagcaggtagtgcctcttcggcttgaagtagagctcttgcccgatcgatacgcttcaccagatcgactaacatttgttcccacgcatcacactgaacatattgcatgaactgatagcagacccctaccgtgtcaaccgagtcacaagtaggtagcatcagtctgatccgacattgctcaccggagtcagacccctcttccattgcttttgtttcacctcaatgttatcgagccgcggctcgtccgtgaatccgtccgggtttgtcgatatccagatctgaattcaaggaaagcaagactgaatactctgctgccatcttttgtcatcaagccctacataccacgtgagaaaacagatataaagctgattcaacgtcatccaggtaccgatgatatagcttcttggcctcgacctccaattcttgcatagcttctcgtgcttgttcctgatatgctctgctccttggctgagctccaaccgtttcgcctgtcacaatcaattcctgggcactcagtcgcaacttttcggctttcattgagctgatcgattggtagagagggttggcggaacgcccgtcatcaatgcacaggtggagagcgttcgggaggaagttccgctgcgtctggagaacggaacgcggttggttcaagaccctcgcgtttccaaagtccaccagatagccgaccgcgacctggcactcctctgaagggggagacagaaacctccacatgacgttgccttgattgaagtcgcggtagtggaggcccttgctggaagcgtaccatagagattgtacgcaaccatgtagaatctgagcaaagtgccgtaaaccgagtccgtcattggctgccgctggcagaccctccccaagggacttctctggcaagcgatgttcacgagcttgcactggcaaacgcattccgagaggacacgcaactgcgagcacgctgaaatgcaatcttgtctcctccgcgggagcctggtcctgtgccaaattgtgaggtcgagtttgccactcgtcgggagacccgtccaagccgtaaacaagacctagcgcgcgcggcaagcttccgatgacatggggatcgacatgttcaccagctatcaggccatcctgatccagatcatcacttcctggtcgatcagagccatgaagacgaatcaggacagtctcctcatgtcctttgagctcttcagacaaccaggagcccttcaagatgacccggtctcgaggcgccaccgttgatacggagtgcgaaaggctggcgataggaggatacggtcgtgctctcgcctcctcgaccagatcggcttcggacgccttgcgcttccctttctcggctgctgtaaacctcggcctctccacttgttccggcgacgtcgctgacatcgagcttccccccatcgagcggtgaggcgtctctataatcttgacgcccgtaggccgttcaattgcgtcctcgggtggcactcgagccggactgaccggctcggtcgaccacactgtcgtcctcgatccgaacaaccagggccgtacttcgacgagtttagttcggcagatttcctgatagacggtcatgccccgagaacgtatgagcaagggggaggtgggctgccaaacggcggacatgggggcctgagaaactccgggctgagtgacgaaagcgatgatttcgacgatttccggggcatgcaatttctcgtcgaagctgtagaccctggacgaggcgaagctggcgccgtcgacagtcaagaggcggatggacggtccagaaatcgccagcccaaaacacctgttcatggcagggtggttccgaatgacgagcgcctagaagcagtcgtagagttcgtgtcagacgaaccgaatttgaagagtacatgcgaagtgccggtcgaaggcacttaccatgtactttagcaaacgaggaacttgattcttctgctcgtcggagtttgccgatctcatgtcgttgttcgagtccattcgaacctcgatgggtacacgtactaccttccagcttaggcgactcgctttattcgcgcgatcgaacgcttccttgggcgtagctccttgttcgtgcatgattgtgataagatccggactgacgtcgcttccatcgcgactccaatcgcccccgtggccgtcttcgaacaccaagtctggacttcgcatcaatcggcgacctttcacatcgtggatgaagggttcgtgtccgtgtccccaaagaatatcggtgagctcttgtaggcggggacataaaatcgagtttgtatattctctttctgggcctcggtccgctctaacggggatccaactcgtcgaggccaattcttccaacttctgtgcagccaacgaggcgcgacggcgagcttcaggcgaatgctttggcttcagcgtgaggaagcgcaggtcgaatctctgactggcaacgtttgcataatccgctgcggtttcatctctgatcatgctttttggtctcgaactggctcgggggtcattcttcgtggaagaactgcgactacgattcagacgggtcggcggagacacaggctggggatctagctgtactacttgagaggaagtcggtatagtaccactgaagcgagctatgagactgtgatcgacttgcatagccgcttcaggttcgggagcgacgaggtcgaccgcccatctccgcctgtaaagcggatagtccgtggtggttctgtcattctttctcatgtcttgaagtcgctcatcctgactgggttcctggtaattaatctcccaacgaaagcccggatcatcgatcatggtgatgagaaggacttgtccgtcaccgccaatcgtgttcgacaaggacagatgagttgtatatcaaggatgtgttttgcaccgtcacagcttctggtgatgactcagtggggttactgtgttagtatacaaacagggagaggactagtttctaatgtttctacagactttagatctagcctaggtctggaccagttcgagtgctagtttgtttgccttgtttccaccttgccccttgaagacttgtaggttccgttgacgtaatgtgacgtaatctcgggtatatttgacgtagcttaacgtcagacttacgtgatatgtatccccccttcccgcccagcttgcagcttgcttatcaacttgtctcgcggcgccgggatcccgaaagcaaaagagtcgagtagttcacttggacatataatcatctatcaaaagggcaacacccggttggtcaatcatacaactgaacaatctcacgactcgtatacctacatatccatccaccttcagtcatccatctggcacaacacagatcgttccacaaaaccatacatacaacaatcatgtccccgactttcagcctccccgggccagacctcgccaccccggacctcggactcacgaccgactcttccatgtcttcttcttcccgcaccgacactctaccgaccatcgtcatcggatgcatggatcgcttggaagagtaccaaaacctgttgacaaagttgtgggaggtcgagagcaaggataaagttaggggagagatggtcgatcggatcgtacagggtggtaagtctcaatcagagcacgacgtggtgatacaccgagaaatatcgtcgcgacgccacacaaccccatgttaatgccaatgcatccgcgattgctgattctgaaatctctctctctctctctgtgccattccttgttacgtcatgtagcaacccgcctgccggccgaattacaccagatgcacatcctcatccccgaatcccagagcctcgccctcctgccttacgtcccgtcccatacgacagtacacttccatcccaacaccccgggaatgtcttcctccacctccctcgaacctaccttgcttgaacggggttggacccggatcgcttcggccggagcgtcttcccatgcggacgcctcgatcatctctttcacctcccccctgaaccagtcgcaccaacaacccgcgtcgtccccctcgtcctcaacaacagcacccagctcggcatcttcaggtggtaccgtcaagctcttgaaaaagagaccgacgaacaaggctcaaaagtcgtccatctgggcggcccattcgcccatgctcgaagaacccgaaaagctgctcacggccgaggataagaaacgaccagagtgtgtcttccccgatccggcggatgggcagaggaagcggagaaagagagcgtgagtttgtcgagtaccgtggccgggaagggacaacgatcgaagctgaggctccaaccccccgttctttcttatcttttattgcgtcttgtcgctcggtcctatgaacggacccatctgcctcagttgcaaggactgtacatgcggtctcaaagaactcgaggacgaggaatacgcccaaccggcctcctcctcggcattctacatcgagggcgatgacgatatcccggaccagatcaagaacgccacggccgggatcgagatgatctggccacgcggtgagaaattacagacggccgtcaagacgtcgagttgcggttcatgctacgctggggacgcgttcaggtgtgggagttgtccgtacttgggattgccggcgtttgaaccgggcgagaagattcagatccctacgaatatgagcgacatctagatttggcagcggtttgggaaagggtggagcgaggtggttgtacttttgacgatgatagctggaacgacacggtcggccggcatgtcttgacgagaaggtgttagatgaatatgtacatagacgacacttgtcgctcgagagagctttcgaaagatctatcgggaagtttacgataatcaagtcgcgactaacggctttaagtgtctcgatcgatgcttgccgtggagcgtagagacaacttccttgcactctcatgctaaagacggtcgttcttccgtcaaacaagaactgatcatcgctggggaggcgtccctgcggtcagcttcgtcgggccaagatcattgatgcgtcatttccttaggtcagaaggccttcagatctagccggcaaggtgaaacctgatgaaaggctcatgaagtggttgtgatatgcgaagatcattcaggacacagcgtactctcttctacgcggctcctttgagcacgtcgtcgacgcttaggtcaagggaattttacgcaagtcattttgaccaatcgagagagagcctccctctagctgtcagacgtgggcggcgagttttcggattaggttcgtctggcgtgcggctcatatgaacgggcgcgggccttgtcccaccactgcgcagccactgggctcagatcattccgccaattcgtgaacgggggaaatgaaggttcagttttgaatcattgacgttctgaaacctctcacttatgtcaaggtcctctctcgatgatttcctttgggaatgtatcccgggcaggggatcgaaggagtgacataccgtctggcttacggtacgcaggcgttctccgctcaggtcaggtctgcggccaaagggagattgcgcctgtccaccgtaaggatagagaggtcttttgttcaattccagcgttcgaggagtaggtccaggccatgcgtgacgctatgctcttcttcagaaagaataggaagaggattatggataacattgcggccataagacctaccggcccaagtcctcccaagccggtctcccttgatcttgtcatacagatctgtgggcttctcatgccccacctggacatgaaaggcccggtgcaggtatgtttgattctgcctttcttactcatattgctatggttattatcctcaacttgaaagggattgagtggcatatgcgggtccgatcgaggggtagacaaaagtcgacactgaggcctcgttgggagctagcgcgggacgccgcagcggttctgctcttgcttgaaacggccaaggtcgcgggtctttccttgccagtggtacccctcgaagagtcggtctcggaacgtcaagtataaatcatacctgacagactgaggatgaacgaaggaaaccaccaagccaagtcatgattatatttgatggcgtttcacgaggtcaacaaggtccggtctgcccataggagatgggcggtaggaggcgggcttgttcacttctaaaggatgaactgcaagttcgaaggtaccgttcgaatcggactgcttgatacgcttgtcagggaacgtcgtcgaattttagaagagagaacaaaggatacagcttatcacaactttctctctgctcgacgcttctcgaaaggggactgaacagtagtatgtactagataaagaagacggtcgcaccgtaatcacggtcgaattatcgcgagcgcctttttccgacccgcatcaacacccaattcaatcgaaacaatcgccgcactatcgaagccaccgaagatgaccaccttctctgtcgtgcccatcgaccgctggaccgacttcaagatctgggcggatctctgggacgagtacaattccagcgtcaacgacaagatatcccacgagcagcacaagaacacgttcggccgcctcatcgacccgaatggtgatctcctgggagtcctactcgtgaccgggggtggaaaacctgttggtttcgcacacttcttgtaccacggggtcgcttggtcttcggctttgtcctgctacatggaccagctttacgtctctcccacgcatcgttcgcagggaggaggccggatgctcatcgaggccatcaggaaggaggccaagcacaagggttgctccagattgtactggtgcgagacggaagacgttgaacccctcgtcaaggaattctactccaagattgccgtcttcgacaggctcgtttacaaaattgtattgtagggcagcgagctctctcgcctgtgtttctgtgctctactgtctttttgaatccgtccagtctcgggcgagcgcttctgatcacaccgtcatacttgtctgcatggttcttctcctttgaagtcaaaaaaaggttccaatgctcatcatgttgtcacaatgagatgcttcagccaacgtccgctcatctacccatcgccgggctcgagatacgctttggcgtctggctcccactcccactccgcttcgtgctgcctttccgaaacagtccacctgatgtcatttcgctcgccttgtacttttgtgcggatgcgatgagacccgctattgtctcgttcctgtcgtggtcgtggtgattgttaagtctaggcacacgtcgactcgcttgtattatccactcacctccgtcgattttcctctccgcgagtttcgttaatctgcttgagccaggctaaaaggttcgccgcttctgaacaagcttgcacgagatcctcttgcatgcgcgagaggtacttgggtggtaccaatccgagttgatctgtaaggcgccatccatcagcactatcggatgagaacatcacggcgcgtcactgaccttcccgatagctcaacagctttccacacctatcccggttgaactcgggacgaggtccgacgtgcttttctgtcttgaccttgacgtggcgtccgtttcgatctcgagtcgtcgacgtgccagggccaggaccagcttcggcgttgctaccgattcggagaggaggaagcgcggatagacgatgggagtcgacctggagcgaagcggcggttagcgtcaaagcccgatatcaggccctttcgcaatcaccaaactcacctcgtcgagattgacggggattcccaggctgatcagctgctctcgcctaacacgagaccgcttccaatccagtgatttcagaataggcggtgtgatgagctgagcatataggtctcggctgaagatgaatgtttagaataccatcagcggcctgacgtacgatccgagctatgacacggtaccaacctttcctctaatgataagatttgggcaagaccttcgacctgacgaacaggctcgtccgtcaaaacggttcgcttgtcgaaagggggatttgtcgataggatgggaaacatgggagcaaggagcgagtcgatttgttctcgcaattcgatttttgaagggagattccgggggtcgagacgtagcggtttctttcatagcaacaaaccgggaaaaggttcaatacgattcttgatagtcctgcatatttcgcatggcaagcttaccggaggtgcaggccgatcggggtcttcccatatgtggtcctctatctcatgcggctcgctaacgaacccggccgaaggatcttggcccgaagagccaaaacctatattcgcatcatctgctgtatttccgaagccgttggactcgacaggtgctccttcgtcgaaatcaccaaaatcatcaaagtcgccgaattcgtctgcgccagctaccggtgctgccgtgtcgtcgaaatcaaagtctccgtcatcatccccgaagccgtcatcctgggcaacgggggtaacggtggttccttgagcgttctcaacagctccaggcgtgtcgaggacgcccacctccgtctgtagttcgggctcgggctgcgacacgacctgttcgtccttttgttgaacttcgatctgctcttcaccttgtttgtttatattcgagccagactcaggctcgtctttttgctgctgatcatcatgctgtccaagttgaccgaaatcttcctccccaaaccctccgggcgaaaggtccggtatccgtgaatcggtgactttggtagatccccaaatatcatcatcatccagctttggtgatgctgagggtgaggtgtccgcccaggctgcagagccaagatcatccaggctcatcttgcaacgaggtatctacgagtttccggggtgcacctagttcagatgagtgacgatcagatgttgtgccggataataagaacgatattagatgttgaccggtcaagaaagccaagttgacaagccaagtcagtcccaactcggtcgggtcggtcttgcgcgcttgacctgcagctcgggctctggaagattgactagtcacctataagcaactctgacaagtgtccatacattctgacactcccaccttcttcagaatacatcgtgccgtctacaaaggcaatagtaaggatctggtagactagcaagctttcaacgtcgacgtccaataagcggttcgacttgtcatcatggcagcaccacctcaagcctaccagaatgcgacgcaggagttccagaagctacaacaacgtccgtccgatcagacttgggggtccatgcaagcctcaaactgatgtgatgtctacttgatctgttcatgacacagagatggaagctacaatcgcggctaggcagaagttggactaccaacagtccgaatcagagtcggtgctcaaggtccgtctcaaagcccctcttcggtcgcatatcgagccgaccagaagacttgcgtatcctatgatactgattcccttcacccaatgatcaggagctgaaggtgctcaagccccacaacaccgtctacaagctgatcggtcccggactcatgcctcaagacccagaagaagccaaatcgacggtggagaaacgtctagaattcatcaaaaaggaaatgtgagtgccccgtccgaggatcgactgtcatcatccctttgtgggatgatgctagacactcaagctgacggaaacgatgaatcgcacgtttccacagtgatcggatcgagggccagctcaaggagattggcgacaatgcggagaaaaagcgttccgaggcaagtttcagaggacgttccgacctcgctatagtcgtagcaaagactgaccacagggttgtcgccgctgtggatgttgtttcgatacagatcatgaaaatgcaagcgtcattacaacagcagcagcaaaagcagggagcggtgtccgcctgagtcgacggaggatctatgaacgttcgacacgacgatatgggtagacggcggagggttgctatagcagcggtgtaacgattcgcatcatgatcataacgatacaaggtcaaggcaaccaaatcctgaaggcgcgggtaacgaaagttttcgtgatgggaaggggtatctaggctcagagagccattaaacgggagaggaacggtgcagtccaagagtagtcctgatcgagttattcccaccgttacctcccatcctctcataccacccgaagatgaacgacagaacggggaggtaagccgtcccgaacgagcgaagcgttgacgggccgaccccattgaaggggtagtaagaacgtcacgttgaaaattgcactcaagcctttccccccgggtcgcaagctccaaagagggagcgacactggtactgaaaccgtttccgtggaaaggccagaccatgggtttcaggggaaagggcgaccctcatgcccataccaagtctcgatctcgaaaccccagagtgcccgaaagcccatccgtggaacgataaagaccatcctcgtctgatttgccctcgcccggtgtctagatccgggttctctgggtagtcctactcctcctccacatccgagccgagcaacccccgcgccgagacgtcaaggattccccggaccgaaataggttcaaagaggaccgacgaggcggagacgcatttctggtcggacatcgtgacaaagcgttaactttggcctcgtttagagagcgatgcttgtcgagtcggtgttttacgtcgaaacatgcaaggagggttataataccaggaccttaacccgctcgcgaaggggattcgtcctgtagtgacaaggcggtagctcttgtcaatgagccatatataagaaacgcgttcaatctcggatgatgactcacgaaagacgatctttgtagcgagcattgtgacctttgagctgaggagggcagagttcacatgaacgtcaattataattggaagcgtgtattgtctaccaagcagtaggacttacctgcacgttcctctctgaccggaagaagggactggacgtgtatagtaccaagtgagatggtttgattgatcttttttctttatacgtgcccggtcgcatgcttgctagacgcttatcaaacaaagaacgcgatcgcgaggtgatttattgaaaagtgagaaaaacctgaaatgacgtgtcggcttccagacgaaacccaaaaaatcgaaatgctatataacgtctctgatcatgccctctagtgatcactacgcaaatcgtgcaatggatacgagacaacctgaataggcgaggttgttctatgtttagaggtgtggaacatgaagcgaggagaaaaatgatgaatcgataaagacgaatctctgtcgaatatgcctagtgaaggaatcgagataggaccgagagacctggtatgatttgtttggcgtgacgagagataggggtagtccgaataccctctccagcgccaaccgtgtttgttctttgttgtatatgtttttgtgtgcaagcaatgggtgggacacaccatcttgctcatgatcgagtcttttgcatctatgttgttcgagaggaagctagcttgatcgctgaatatgcctcgggatccgaatggaatgagtagctcagaggggatttcaagggcggcagccgcgtatgaggaggcccgtgtaattgcctatgcgactgcgtaacgaaaattgttgaatggaatgtgaggtgaccacgaccgaacgagtcgatcaagaactcctcgagaatgcgttgtcgtatccgctagggcccagtgcattcatggctccgtactgagatgcctgcgggttgatactagtcatcggccacggcgccggaaaggcagcacgaggggagatcggggccaacgatccatccctcgtctggcggccctcgctgccggaggaagggaagcgctgcagacgtggggacgtcgcgatggccattgcctcgtggggcaatgccgaactgttgaacggcaccgcgagcggagacagaggcgtttcagatttgaagctgctcgccgctgctgaatcgttgctgtcgttacgtccaggaacgtagttggcaatgtatgggatgccgttcaaggaggacgatggactgagaccaccagctgcatacgatccaggtgaagtgatgtcggatgcgctgatgctatggctcgtgttgatccgcgtcggctgagtgggttgcccgttaccccgttgtccgagactattcttggagtacgacaggcgcaagccacccttgacaagaccaccctgggagaagcaatccggcgaaatcagcacatacacaacggcgtggcgtcccggccaaagcttactagtgtattgccatagagatctttgattgcgagtgtggcaaagtctacgctttcgaactgacagtaggcggccatcttcatcagttcaatgtgtgggccgaatccagatgccctagcttgaacttacctcgacgaaacacatggggccattgactttttgcctgaaactcattctcttgaagccagacgccctggtaaaaaggttgcgaaggcattcctctagatagtttgcggattgagttaccgccaggtgtgaaggcaaattaccgacatagagcgtgttaatcggcgggttttggtctgcaatgttgagactggccactccgccaaagtcggacagagacctaggtccgatcataccgggaccggctctgcgacctgtcaatccggtcaacgctcgcggtacaaacgactgatcgtcccgtcgaggacctccgggagtcgcctgattgaggtcatcgtatccagtcgtcggactcgtgacggatttctcgttgcgattcggtgccgggctgttgtttctcgactcgccgtcgaaagagccgagcgcttccataccgacaccgcccacgttccaatcctcgtcgtcgtcctctgctagagcaagaagcgctttggagtccttgggaaccgagtaagccattggggacgtaaagcttgggccgggcgacgtgggatcactggacgacaacatgctagcctggcggtccgattggattccggaagcggggctgcttccactgagcgcggcgcccgatgccgccgagccgctgagcgaagatcctagctgagccgtcaggtgctcgtcggaacgtctgtcaccgaatgcggacgaagggaaaggatgctccggcacctgcgagagcttgagcgggttcgaccaatcggcgctgaagacgctcctgagggaatcgtttcgccggtgtttctgcgtcttgttattcatcggggtttgttccatttccatacttgcatatctgggcgaaaagacgggtgcgctctgatccatttgccccgaaaagctcgttcgaggcgcgaaatcggtcgtttcttccgtcgcctggcctagactgggcatgggttgtccgccggactgttgcatcatgccagatgcgcttgactgagcattcgaccccgccatggtcaatgttgcaaagctgtccgacatgctcatcctccgtccactgggcgtacttgcaccgctgcgcaagtcggctccgccgtgaatgctctcgggctgacgcccctgaccttgactaccgttggagcgctcccggctgagcacgaagccacccatgcccatcccagcgagcagaccgggtagcttgccgctcctcatcaagacgtccattacctcgctctctggaacgcccgacaagctgagctgacccgatccaaagcctcgcctcgagtgcagattctttttcgccatttcgactttgagcgtcgcgctagaaaagacgtcgattttcctcccctgaagggtatcccgggcgaccaaggcctctgccctcgtacgaaacctggcaaagccaatgacctgacgacggggtggtcctctgttggcagagttgagcatgccgacgagagaggtggtcgaggaggaagcggtcgaattttgaccgagaccgagtccgagggcggccgcggctgcggcggaaagcgcacgaacaggttcgccgccgacccagccgatcatcgactcgtcgtcgtccttggcgtcatccccgtccctcttgctcgggctttcacccaatctcatcggctcgcccgtaaagatcccgagctgctgctgtaccgccagcggcaagctcagcgtcggcgtagtcgcttctttagcagggaggaccgagggcgcattgggaaacttgagagacgcggcctcgaacccgtgtgcaaaagtaaaaatgttgctaaattcgcgttcctgtggcattcaaggcgattggatcaattgaccggcgggaagatgcgcgactgcgtcgactcgagagctgccttgactcacggaaatatcatcaggaaacccgaccatgaagatcgtactgatctcctccctctcgatcggctttttgcccgatccttcgcgtttcccacctcggcccgaacccaagccatccctatctccatacacgtcctccttgtcgctttcccccgctcctggcccgccggcacctgcaggaccacgggatctgctcgtacccctactctgagcgagccgggaggatggattcctactatcactcctactcctgcccccgcgtcgtttactcttgctcctcgtcctcgtccgcgttcttgtacgacttggattccgtccgttcgtcgcgttggctgcgcccgggtcattctcgttgcccatcaaactttcgtcgttggggtcatgatgatcgttctccctcgtctgatccgaccggccgggttgtcctcgtcctcgtacatcgtccggaccttgcctcccctcgctacgatccggtcgatccccctcgtcttccggtccactgtcgtcgtcctcttcccgcctcaacaaccgatcgacgacggtatctggtcttcccctcatcctgccctgcctcgccgtctcgatggggactgacgccgggacggtctgaccggaaggattcgtccccggtggaccaaagatggccttttccatctgactcatctgtctccctctcgatcgctcgtccatcccgcccccgctcgccatacccggatgggtcgaatcgtcgatcccgcctaatccgagagcgtggccgttcgagtaacgcggttgctggatgatcccctggggttgtgacgattgatagaggtattgttgttgcgatggtggtggtggcggtgggagttgctgttgagggtggtaattctgggaagtgttcggatacgtctgtccgggctgttgatgctgttggtgatgcgacaatgccggtcctcctcccaacgacaagctagacgacccggcggaacctggaggcggcacgaacgtctgagaggcaaagaccatcctggacctcggatgttgtccctggccgtgtacctctcgctgtgcgaacgccgaaccctggttcgtatacccaccggggtcgaagaccgaggacgaccccgagctcgtcgacccgagggaggagaacctctcttccggggtcgggttggatccacctaggatgccagaaccgttcatgttcaggttgacagcgtacccgttggttcgacctatcgagccggagccgtacccatgggcaaaggtgtacccctgaccgtgactctgcggttgacttgaagttgccgatgagggacggtttgatgatgatgatgaagaaccaccgattccaccgctgctggtattggggttcatgccggaaccgatccccccaaacccgggtcctccgacggcgttcgaccgatcgtactcgtaatccgagaagaccatctcgtcccgcgtgctcagaccttgagggggttgatggtatcagagccgacttcggcagatgactactgtgctaaggctagcttgtgtacgaccggggagtcttgaagagatggtgcatcaatcgatctcgaccgtcgccgccgtcgtcgtcgtcgtggttgttattcttgtgttgtcgttgactcggttctctttattctagtgtccaagtcgacccaaggctagtgtttgatctagcctacccaacctcgtagaattcgtatggtcgttgatgcggtacgtgacgtgtcagtgcgtagaatggtacagagtgataatgatagtcgagtgtgtagtgatgatgatgatgtcgaggtccggcggtgggactcgtacgcgccgtttctagtggtggtgagatgatgcgggccaggtgaggggggggggaagagagtgacgcgagatggggaatgctagatgtggcggagacggtggaatgtggcctgctcaagttgggtcgacaagtcgtgttgcgtgttgtggatgtgactgtgagtggccaagtgagtaggtagtgaagtagtggtacgtgagagaagtgtgtgtgtgtgagtatgaatggtatggttgttgggtgtctggcgtgtgttgaccctcgagacttgcccctctcggatccgatccacccggaggttcgcgaggcttcaagctaatttgcttccgacattcgcccggtgtctcgcgatttcccgatcgggtaatcgcgattgttcggaagattgaccatcgccgaggggatgccaaccaagaagtcacgtgacgggtcgacgacgtcgatatggtcaacatggtcaacctcaaagtagagtgtgcacgggtcctagacctgttcaccgtgtcctggctatcggtttaggatgtaacttcctagtggcgggattcttcgcctcaagttccggcgggcttccagagtgctgaccatgtgtgtgagctgtgatcgaaccgttcctttgaccacatcgcttcgcacaccatgtcgatgtcgaaaagtgaggtgaccagtatcaaggtgtttttcaaaagagctctcttgctcagagttgcgagcaggagaggaactgattgtcattccaagatgggagaatcatggatctgagagctattcactcgaagttcaagcttgacattgcgagattcccaaactttagaacctgacaacatgattcaatctggatccaaagccgaatgccgtcatttcgtcttcggaagcaaaattcgaaagttggacggtcgaaaatgtcagcgagccagatttcgaaagcaaccgcaacagctcttcatgtctaatgttgaacagctaatcaccaccagtagtatcggcaggtccaacgaataaacgtcaatcaatccaactctagacagtcaagcaaggacgacgacgttcgttatgtccgcctcgatacctccgcccgcttctacaatgaccaccagcacctcgacctcgacctcgtcgcactatcgactccacctctcccccctccccccgacgccgaccctaccctcatcagagatcatcaaattcttctcccgtttcggcaccccgacgacgttcgaacgaccgggagtggacgggttgggtcgggatagggatttcgggtatctcgggatggatttcggggaaaagggggaaaaggggttgagcaggtgtgagtccagtcgggtcgggtcgagcttgtggtttctggttcaaaaactcgagtagcccgctcatgctcgatattcgatccggtatcactaggtatcagcatgacctcgtctagcgtttggagagggatcaagctcaaggtctcgttagcaaaaccttcgtacactttacggtaagcaaaaacgatgtctcccccactttgaacgtcgaatccgctcgctcactctcctcgctctacaatcatcatttcacgttcaaaccctcgcactcaaccgaatgatcagcttggagaacgaacacaaccctcctccccccgcgcccgccgtcctggaaaaacgtaaccgcgcgctcaaattgaagaaacgcagggataggaaacgacgcatagcggatgccgatggcggaaggatggatggggatatgaggttggtcgatgaagagatcgtacagtcgggtgtgagaaaggtgagtcgagtcgattcgccagacctcatggtcgatatccagggaggggagaagatggaaatctgacctgatgatgcggtcggatcgggttggtagcactggcacacggtcccaggagaggaacataccattcttagacccatcttcacccgccctactcatccgctcccacctgtcacctctacacccacgctcgttggatcagccacgtcgtccaccaagcctgggccgactacctcgtcgaacgctaccccgttgaaacgcaagaaacaacgcaagagccgtactaaaccgcccgtcagggcgaaaagagtttggttggacccgaccggatgggataggcagtaccgagtgtacggagatgaacaggttatgaatcagaagagggagacggacgtcgatgggatgtgggtctgggaagaggaagaagtggacgacgacgagatcgccggtagatgggtcttcaaggtcgcccgtgctggttcggaggacgaggtctcgctttcaggaggagacgtcgtcgagacggtcgagactagggaacaacgcgtccggtccgtcctacagaccatagccaaagagtcgatctggccggcagagtacctggacatcaccccgaccatctctggaaagggcggcaaggtccgcccacaggccaaggccaaaaaggaagaggttcttaggctggaagaaatggatgtcggcggattggaagacgaggatggattgtggggcgctcctacagcgtcgggcgggatggacggcggattgttcgacgagccagtcgtcgaagtcatctcagccgctccgatccctgctcgcacggaacgaggactcaagcgtacggtcgaagagagtatcgacgatgaagagtcggagcttgccgaagaggacgaggatgtggatgggttgggagacgatgacctctttggggatgtcaagcagacgtccgtctcccccttgttcgggaacacgactcttcccactccctcgtctgtcaaacggcaaaagaagggtcaggccttgccctcagacatctcgaacgactttacggatgccgaatcggatgccgcatcctcctcttcgggattgttcgaagatcgggaggcgacaatgccagtgagcagcaagggaatgtctctaaaggaagtcgtcaagacggaaaagaacaccggattatccgtactcagtgcgctcgggttcgacctggatgaggctcgctcagacacgcctgcctcgaaacccaaggccaccatcaggcaagacgagagctcaagtgacgaatcggattgggcgccagcgatgcgtttgcgaggtggagcgaccgatgccgagatggagagcgcgtctccgagttcgagttcgagctcgggatctgggtcgagctcaagctcgagctccgacgactctagctcggaggatagcgatagcagcagcagtagcgacgaggaatcgtccgaggaggaggatgtcgagatgactaccgagacgagggaggtgacccgtcaacagacattaaaggacatgtttgcgcccaaggctgacgaaggtgagtcggccgtatgcatgcgatcgtgagatcacggctgagtctgattctgcccggtctattgtacgatcagctcaaggcggattctcgcttcttgctggactggacctcgagcttgattctgatctggaagacgagacaaccgttgcgcgtcctactcagcctgaacccgtcgccccgatctatgtgcccgcaccggccgtatcatcggcaggcaaggccgacctctttgctccggaggcgggtaagccgttcttctttttcgacacggccaaggcgctggctcctcccggcgacgttgcgagcgcggacgagttggggaaaaagtggttgggtagtgtacagaccttgcagggcgagacgatcgaggtcaagccgttcgtgaggaccgagaccgagtaagtgaacgacgattggatcatccgagacgtcaatctgaaaacgctaactcgatccaattgtcgacgttgcttctgcagcgagcaaatgacgcaagcttggagggaatccaaggtcgaactgacgagggagtggaaaaagcgtcatcgagaggccgtcaagcgggtcaagcgtgggatgggcagcggaggtgcaaacgtaggcgagtttgccgattagagcatgtcctggtactgttgctcgtggcaggtgtacatgtatgtatacgaggtgtacgatcagaccaccgtgatttgagcgcgccgtccaggtcaaagatgtgtctcatgaaaaacggtgttgcatggcgctcccgggctgcgactcggtcccattgacacatgttgcaatgccggaagccaaccggtgtagctgtccgccaccgctctgacgccctctagaccacttcctgtgttgttctacttgaatctttgcttcaggcacatgatggttcttggaatgttaatcttgtgagggaccggacgttgcttacgaggcgctggatgagctccatggcctgtccgtccgcgctatggctggcgatacaggcttgacgggctagatacgtcacgatatgagtcttccgctctcgttcatcaacgattgagtagatccgcttacattcagtcagcagaatcctgagcggccgactgactgacacatctgcatcgatttgacctgggatcaactccaatagcgcccgtagttctggtgactctgaaacgagagggttaccaaacgatgcaatggcttgaggtgtcggtcatgtccgaatatgccgtcattcgaattcaatttgattccgttatttgtatccgccctcttcccgaaatccgcctaaccgacattgccgaaactccaaccaagaactgtacaactgtctcgatccaagttcagaaagaggttcatctgtagctcaggagtgattaccaaagatatacagacatcgatcaaattattacaaaccaatacgccgcagcaacatgaggacaaccatctctagcgtgatcaagaagaacgtgacggttctgaaaacgtcacccgcgaccgtccggtatgcaagctgtaagtcgtgcttgcttcgacccgcctcgttttccagatacatcctgactaaaagtcttgaatattccaccaaattgatagccttctccaagtttgattgggaggtatgtattccccccaacaggcaatcaatgcgccgagactgttctgatcgatcctgccgattccgttcacaggacccgctggattctacatccctcttgaccgaggaagaagtcgccattcggtaagcccattcttccattatcactaatagggccctgtgtttaatgcggatgatcctcctcaaatttctagtgatacggccagagactattgtcaggaaaacctcattccccgcgtcgtcgatgggtaccgacatgagagtaagcagcttacaccggcagtgtgcagatgagacatcgaatactatagtgacctttgatccctttcctccgggggaacagactttgacaagaagatcctcgccgagatgggctctcttggtctcctcggatgcactatcaagggccacggatgcgctggggtctcgagtgtcgcttatgggttgatcgcgcgagaggtcgaaaggtgagccatcgaccttgaccttggccttgtcttttcgtcagtagccagtcttcaaaattactaatggtaccccttgttgtggatgtccgttttgtgcagggtcgattcgggttacaggtccgcgatgagtgtgcagtccagtttggtcatgcatccgatcaacgaggtcagtccagccttcacccagactctcgggcatgaggggagcgtcggctgaacgtgatcgatttgatgggtagtttggaacagaggagcagaaggagcgcttcttgcccaagttggccaagggggagatggtcggttgctttgtgagtgtcgagctcatttcggaacgttgcgcaacgttgcatgggactgtcctcacacatcccgatcaccgattttaatcgtgactacacagggcctcaccgaacctaatcacggctccgacccttcttccatggagaccaccgccaaggaagacccagctacgggaggatacgtgttgaacgggtccaagacctggatatcaaacgccccggtcgctgacctatgcttggtctgggcgaaatgcgcctgggacggcaagatccgtggattcctggtagagaccgtaagtatctctttctgtctgagtggaaaaggcatgaatgaccatgctcgagatgctgaattgtcaacggcatttgattcagggaacgtctggtctggagacgccggcgatcaagaacaagttggcccttcgagcttcattgaccgggtccatctttatggatggggtcaagattcccaaggagaatatgctgccgggcgtacacggcctcaaaggcccgttctcgtgcttgaacagcgccagatacgggatcagttggggcgtcatgggcagtttggaggattgtatcgcccgagctagggagtacggattggaaaggtcagtggaattacgctcttcctgacgagatcggtccaagctgatcagtatgctgtctcacaggcaacaattcaaacgacccctcgcttcgttccagctggttcagaaaaagattgcggacgcggccacagaggccacgctcggagttcttggctcactccaattgggtcggctaaaggatgctggcacgtggaacccggagatggtcagcatgatgaagcgaaacaattgtggcaaggcgctcgagcactccaggcggcttttggatatcttgggtggtaacgcttgtagcgacgagtgagtcggcagggaacaagacagcggcacgcccggcttgcatcagtcatctgattaccctgctcctgtcttgcagataccacatcggtcgacatgccgccaacctccaggtggtcaatacctacgaaggaacacatgtaagcagcgtcggcgaaatcagccgatcatgctcgtctcggctaatcctaccttgcttgacaggatatccacgccttgatcctcggcaaggccatcaccggacactcggcgttcgcataagaatatagtcaattgtagccataagagcaaagagtcatgaccccaaacaagtattatagcatattgttaaggccggatcgagaaggtgtatgtagggtagattacaaggacagtcggtgtgccggccggtactattgcccgatggcttcaaggatctgtaagatggctttgcgtaagagggccacgttgaattcgatcatcccttgttgctggttcagcacgtcagagctgaccacgctcatcagtgcgagccgactgcgagcgtgtcgttgtcaatgagctgaagggtaagcgagacgacgagtggcacagctacgcactttgtaaactgccaataacagagactcgtattctcccctaatcgagcgacgttagctggccattccttttcttccggatcgtcgtcttcttcgtctaaaagcggatctcgcttgccttccctctttgccttgtcagatcgagccttcattcgagcttgtggtacattgctagcaacaaggaagaaggtcagctaaaacttccctatcggaacgagcgtcaataccaaactcactcgaaaagcgattgaaaggtcaacatccgcccgaggtagtcgctgcagagctggaacgtcgaagattcgaccgaattgatgtccatggcgacgtagagcttggcgttgatgtcgaataagaacgatttgtgcatggatgattgctaacccaacatgacattcgacatcagctcgcgaccgcaatgtcgatcagaacctggcagcatcgccgtacctgtccgaaggtattcaggagcccctcgatcgtaccgtaaatatcctccatcaaccgctgtataaccttgctccacgcctcgtagatggtataattgtgaatactagtcaaccagaacctcgtctgttgcgtcgtcaaggcgtccaaccaagcgtccgaatcttccaggctggggaatcgggcgttcgggtgagaatcggataaagaggcccaatcctggaaatccgcaatctcgtccatcacccgaccggtgatctcgcggaaatcttcgtcctgccagtcggcgtcccagtgatcagccttgtggatgaacacttcaaagttgatattagggttttgggcgtaggcgaggataaaggtggggacgatcttggagatggggtgatgcgtgtcttgctgttttggtcagggcttgaaatcagccatcacgggcggaactcgcagaacgacgatctcttcggagacataccgacacgtcaagcatgtacaccacggtagagaattcttcccaggtaatgctatccaggtcgaacgaccctggggtatcccaaagctccagaggtaagattgagctgagttcaggcacaacaaggtcatgaatcaggaccagtagacgtccgtattcaacatttcgtacaagactacccactcaaagtcggtcttgatgatctgttgagtcgtctcgagccagatggtatctttgggtgtcatcccctcgaagaccgctttcaacgacgacgtcttgcctgacctatcgcaaagttcgttttaaataagatgacactgcctgagtgaccggttagaccaactttttggctcccaagaccagcacctttcgtcgctcattcccgtagcccgacattccgacaagtccgagtctcgaccgtagagatcaaggccggcctgctcgtagatacgactttgcgataccgggtcgaggtgtctgagtgcgggctgtgcttgtgatgcagctggtcaaatgtgaatgctatgagacggtatccgctgcttgctgcctggtctctgggaagaaacgccgaaagtgaggtgtttatgtcgctacgagacgagattacaaggtcgacaaggtgttgatgatcctctcaccttagcctttcccgagcgcgctaacacgagaatcggccccggtcaggcaaacgggaggggaggttgcttcgtcacatcgtccatcacatcgtttgcctaaatgtagatatgcagatatttggtctagacacatcgcaaactctccgagatcatcgtgaaggagtcgaatcagggctgaaatcacatgcacattttttagcaagatggagcgatgtaagtggcagtctcatggtgttgagattacgcggcttgacagctcaacggatctcatgtcctttgtcgtatcatcagtcacctttaccgtcggcaagctcggtcagttggaatcttttagaacgttgatgagagctgtaactaaaggtctcgcttcacagatgccgggatggctgtaagcctgcctcgcccacttcagagggttacaacgcgattgagagctcatctctcgcaacctcattacagatcctgatcggagagcgagcccacctgatcgagttcccctccttacttctccctcctggcgtcacgtcgggctcgatcgtcaacatctcggtcaaccgtaatctcgctgcagagaaagcccaactcaaggacttctggtccttgcaagactcgatcttgcaggaatacgggttggattcaccttccccacccgagctcaaattgaggcatgtcacgcagactagcgtcaccttggaatggcctgctctatctctggctaaagccgatgtcaggagtctggagatttacaaaaacggagagaggttggcgacgattcccaaccccaaggcgaacacgagcaccaagttgagctcgttgcagtcaaacgaggaatacactttccaactcgtcctgtaagtttcggtcgcaatggccggaacggatcgaattagagctcatcgggtctgctgtgaattggtagcaagaccaccgctggaacatacccatccaacattgttcgcgttcgaactcacactatgaagtcggtaacgttcttcgtcatcatcataccccaggcattcaaactgacttcgcgggtatcgccttcagtgatacgtccggtatctccgtttgctttggaaacgtcgaagatcccactgctctatcgcatgccaagcaggcactagaacagatgagggccaagtggactgacaagatccagatcgaaacgacccactttgtgtgcagcaatgccgggcctgtcgggtcgacttatggggagggatcgatgtgagtctggaatacacggtctttgtgtgcggatacgctcagtactgatatcgtataccggcatcctagggctcctagcgccgagttccaaaaggccactcagatgtcgctgccaattgtccttccgcaatgggttttggcgtgccatggcgagagaaagtcagtctacacgcatctcccgtatattagatgtgtgattcgagcttaacatcctcgactcttcacaggctcgttccggtgtccaactacggcctaggctctgctcctgcgcattccaccaacactcagcctttcgttaggcgaccctcgacgagccgtcgaaactctatgaccgaagccgctgagcagcttggtaatcgacgagctccgtcgcccgagacgattgcgaggatgagtatgaacccgtccagtccgaccttggaagctccatcgggcagttggcagaggggtgcagatcccgagggatcacaaaactcggccgaccagcctatcgcgacgacctccacgcccgctgcgcctgaagtcccgacaaaggtcgaggaaccaactaattcgtcgccaagaaccaagagcccccgaccagaagccaacgggaagctggacagacggttcaagttccccaattcgcctagcccgccggtcaccggatcggcatcgacgttcccggagcaacaagccgaaatcgctgcccctacagagaccgtagagcagaagcaggaaaagttcgaagccgaacctgccgagacggtggagagccccaaggcggttgagccggaaccagaggctgcacctaccgagccgatcaagattgcagaggagcccaagagcgtgacggggaccaacgaggccgcccaatcgcccgtggcttcttcttccctaccgacgaagaccgacgaagcgaagagcgaagaggacgacaagatcaaagccaaggaatggatggagaggcagaacacggtcgagctggattccgcggtcaaagaacaggagcctgagagtaccctgatggcggatttgaagaaggaagaggaagtcaccaagccgtctgaagtcgacactccagtacaaccgggatcgcctgccgaaattcctgttaccgaagctcctgccgagacctctactgccgcagccgcggccgaggaagtccagacgtctcgtcccatcgacgtcgtggatgtgacgggccaaacgaagcccgtcgcttccggaggggacgacggggtggaagagcccgatcagatcgtacctgctcaggaaggacctgccactataacatctgtcggggctgaatctcaatcggaaaagaaggagattgtcgacgtcctagaagacctcgaaggtggagaagacgcaggggatgctgatgaggcggacacgcccaccgctaccggcgcttcgacccctgcagagaacgaggtccccggtgacgccactccgggtggacagaccaagtcgtccgggaagaagaacaagaaaaagggcaagaagggaaagtaacaaactcggagatcagtctagacggcgaaagggagagaccataggtgacacatgtggaagacccgcttgtaactctatagcgacaacgatcatgacggcgggagtccgtctttaggagataattctaaacttgctcttcatggtgaccatgcgcttgtccatgtaacgatcatgcgtagacagtgaaagcgagtcaaaccaacggaattttcatgatgaggaggtaatcaagtcgcatgcgcgctccacctgttgccgatgaccgtcgctggagatccgtgagctgggaatacggcactggtccagaccgcctcccggtcgtgtcgccatgatcaaagacgtcgagtaagagttgcgcaaagcggggactgtttttcagcgactcatgatcaccgccgtgactagcccactgaagatttgcaggactgggcaggacttctggccgtggtcctcagcctgtgcctcggcggaggcgtcgtctatgatacttatggcagtaagaacttggaatccggcgtatgggggatctcagttcttgctcttgaacgatccttgataatcgcaatcgatgacatatcgacttcgacctcgacgatggcgcgacggcgcgaatatgccaagccaaatgaccccggtgaagggcgtctcgatccacgtggccttttgtcgtgattagatcccggatccacccccctcctcgtcagcttcttcttcctagtagtagtagtagtagtagtagtagtagtagtagtagtagtagtagtagtagtagtagtagtagtagtagtagtagtagtagtagtagtagtagtagtagtagtagtagtagtagtagtagtagtagtagtagtagtagtagtgtagtgtcgctcgctcgctctacatctttacaatttcgatttcggagaaacgcgcgaccgtgattcaggcgcagctgcagcttcaaggggataggacaaacttgtagacaaatcgaaagagagcccttagatgtatatagttctccttctgatcacataaacctacacaatatgcctttcctggacgtaccttcctctccgtcagaattaccgacagcgtcaggctcgtccgccttgccacatctcaagctgaagcagaatgagcaggatccccctaggatcggtgccaagtgaggatctcttgacttgatgagcctagacacaagctgatcagcccgttcagtccagactacaagaggttgcccttacacctgttgtgagtggagcatacccggaatgagcagcgtagtgtggcgcagctggagttgacggtcgagcctcctatatcaggccggtttcgtcatcaagaccactctgcaaacactgcacgctgctacgtctgccccgccattgacgaagctcttcatcaacgtatcatcggccgaacaagtaccgccgccttcggacgaaaaggccaacccattgtgtgctgtcggcgctgccgaatctaccacggacaagggtgagtatagctttgacaagaggggaagggtgtcgttctttgccctgcccaagctgacaagactcggtacattctttagccggtaatcggtctctggtcatagatgcaactttaagcgtggaaaacttgagcaagactaaaagagacaagaagtacaagcaatggttgatccagtgggcgttggaaaaggtggaagagaagctgggcgtcgaccttagccgaagtaagcccgtgcgatcgaatccgcaatgccagagtgctcacaaccatgctcaactcagactataccgagccaaacatcaaatcgaaaggcgcattactaccaagaaaggctgtactacccattcctgtcgttacgcctgctgcgaccaacaagatccagcttgtcgaagaggaggaccgtttacagcgaggcagtgttacgcagtcaacatctactccaaagtctgcttcgatacaaccggatcaatcgaaagcacttgtcaagccaaagaccgaattcgagattgtcgacgaaggcgccgcctttgtgtttacgatcatgttgcccgaggaggtaggtccagcaggaggcagttgttcgaccgagaaaaagaactcatatctcctgctcgaagcctgcattcgattcggtagcaaaatccgcatctttcaccctcacaaagtcgcatatagcgtttgcttctcctcgatacaagctggacaccgatttgcctgtcaatgtggacgtacaagatgtctcaacgcgaggagcggagtggagcgagaaggataaagctgtgcgcatctggggcagattggaactatgacgacggataacggaatttcatatgagtaattcgtaatgttggaggatcatgcataactgtatgcctatatggcgaggatatgctggctgtaggcagaatctcgttcatcaaggtcgattacgtgattttgaagccggatctcaaatttcacgtgacccggattacaaagttgggctcgagagtctgtcgggatcaccatatttattagctgttgcagttgatgatagcaacgttgtggcctgttttctatcctagctctcctagctagcatccccaagatcgtttggctacaccaagccatcagacgtcatggtaagcttgtgatgcttatcggggattaggctcgagctgattgatttgacccacctcagcttcgaagacaagctcgtgaacgacgagagtacatctttcgcaaatctcaggaatcccaagagaagcagatatgggaacgtaaacagcggataaaggaggctctggcttctgggaagcagttgcctacggagctgcgtaatgaagcgcgaacactgggagggaaggatttggtcctggacgaggcccagaacggtacgctcggttcttcgacctgcttccagacctacctctcgaggctgaatcggtcgacttgttctttcaagaacctggatcctctatcgacgatgaatatgccaaagtgggactatacgacccaaagatcgtgattaccacctcgcgggatccctcatcacgtttgcttcaattctccaaggtgcgttgctttccattctatcagcttgattgaaaaatcttttactgaaagacggccgtggtatttgcaggagctccgtctggtattccccaattcataccggatcaaccgaggaaactacgtagtcaaggagctggtcgaggcttgtcgagcgaatgaagtgaccgatttggtcatggtccacgaacaccgaggaatcccggatgccatgatcattactcatctaccgcatggacccactctatccctcacgttgcacaacgtcaccctgcgtcacgatattgcatcgcactctacgtctacggtgtcggagcagtacccacacctcatctttgagaacttctcgaccagtctcggtggacggatcaaagccgttctctccgctctgttcccggttcccaaagaggatgccaagcgagtaatgacttttgccaacgaagaggactttatcagtttcagacaccacgtctttgtaaagaactctcacaaggacgtacagttggccgaggttggtcctcgtttcgaagccaagcgtgagtttccccgtcgctctcgcagcaaagattcgggacgaggctgatcgcgcttcatcattcgttttagcatacgaaatccgattgggaacagtggatcagaccgaagcagacgtagagtggcttttaaggccatatcaacgcacggcccgcaagcgcaactacatttagacgtcggtagccagcaccgcacagattttcatttgtatatctcatcccgtttactatctcgttgtaaggccatcatcgatttcggacacatatatgtatcgttgtgacacttccaaggtatcctctatcctctcaggtcgacgccacactcatagcgccaccctcgccgtcatcgtcgctttcggtaccgctctcgcccccgctctcaccatcctccgagccgctgacatcgttgtctcccaagctgggcaattccatcgtttcaacttcgtaaccggcattcgacagctgcgtcgcgatcttctcgtcgagaccggtggctgatgccacaacgataacgctggacttcgggtcgaagagcggcacgaaatgcacacggatcgcttcgcgcacctggtccaccgagatgtcctgtttcatgcccgactttagtgaaaagcgccataagcacgagtctatgtttattactgaccttgagcgaagcaagccgacgagcgcccgtatcggcaggaatctgcttaagaacctcattgatgaagacagtcgaagcctgaagcgtattgtatgtgcattagctcaggtctgggaactacgcgccgaaggacccattagcttacggccgctgcgttgttcccttcctgtcgggccaaggtgtaggaggtggtgcttctcgcagcatctacaaggttcttttccaactcaatctgttgttgcaccggtccatcaatatcgcatgcaagcccaatgtcgtctcgccatatgacttacggaaccatcggcgagacccctcaccacatctccagctgcgctgaacgctttgtaggcatccgggcttctccaaactttgaaagaggtgagtccagcttcttcgtcaacttcgatggacgcgccatatgcaagtccggcacctcggatgtgtttctacacacaggcaagtgaagtcagcggggagacagatatgcgccgaaaccgcatttgtacttacccagaagtaggattccaaggcattcaacacacccgccgctaactcggttgcagccaggccctgtgcatcccatccaaacggtccattggcgtatgccacaccgtaggatccttcgacacttggcagcgtcacaaccttggcctatgtatgtcaagagcatcagcaagtcgatctctcacgtcccgacggatccaggtctcgctacctttttcgcaggagagagacccagaggcgacataacatctctagctgatttcagcggacgaaggcctatacgctatcgagaccggacacaaccctttcatcagccacaaaaccctgagctccggacggattgtactgacgttgaaaggcaggaagttgtcgctaaaggctgatctgggatgtgtcatggcaagaatgtcgccggcaactgagattctcataactgccgggtccaacaggtattctcgtagcgtcttcaactttttgatgaccgatccagggtcttccttgagttcatccgcgatcttcgggagcgaagtgagtgtcgcgaggagtccatttgcgatggaaggcgacttaaatttatcgaacagcatgtcaaagatggtcgacgatcctgcactgttggcagatcgttttcgcctaggcagatcctggaggagtttggcgatcacaaccgagagtctttcgatgtcgaaaattccacgcgaaagaagatcgcgcaacctttaaaaagggccattggatatgagagcccagccgagaacgaaactgcgtctggttgcagacactcaccatccaatagcgatagcatatttatcctgctctaccttgaggtagacttggaatacgtccgagaattctcctcttaggccgaggccagaatcgtaatccacagtcaattcggtgagctgggtgactacggcttcatgatcgatgacaccttccgggcgttccaccggtagggagaacagggaagattcgaacagcttcagatatctgtaatgcgagagatcatgagcccgattttgcgacaccgcagtgaattcacgcacggcatgagatcagccggaaggcaagacgcgtcgaatgtgacgcgaacagtgacgaagttggactgatttgaccgtaaatggttggtttggaaggaacaacagcatcgcgaccgccagaaaaggcacctaccgagacatgagcgaagtggacagagtagggcaattcctggccttccgcatcaacatgggcttgtacccgaggtgaagcgtttccaaatgaagctaccggattgacggcgctacaaattacagaactatccatcagtcgtagtcgtgaaaagatcacaagattgaacttacctttccacaggaatccaatcgattttagaagcctgacattcgatcttggttttttagcgactcataggaatgaaaatagcagacgcggcttacatcagagatcgggaaatcggtgatcatattgtcgggaatgggtcgatcgttctctttctgggctgcggccaattcgtctgccttgcgttgcaaaccagtttcgcccaaggatgcctttgtggaagctagcctttctttcgcttgttcgctaatcttgtcgaccatagccgccgacggcttgcctacaatcgacacacaaggctgatcgacgaaatacctgaaacggggagtctgcatgagtagtctagaagatcaagggaggcttgcttgtaatcgtgggacagacttttgcaacaggccgacccattgttccgcgttccaggtcaacagtctcttgtattgatccagatcgtcaaaagttcccgccagggattttgagtccaggtccccgtacaagaagtctgggcaagtacgattggtgaacatcaatactacaggggacagaattctcgtgcggactcaccggtaataacggggtcacacaaaacatcggtaagtcgagtctcggcggtagcgaggagttgccttcgatccctctcgataacgctctgcatgcgtttcatatctaacggaccttccttggcagtaccttgcgcgatctcgcgcagagccgatttcaattcagaagtcatcttctccagcatagccgcggggactcccgagatgtgacaggtgatctcagaagcgcttgcgcgatccgatgagtagaacccgattgccgtacaaaggggtttggcaatctcgacaaatctcttattcaagggtgcaacctctgtatcggtcaagtaggtcgtgaggatgtccaatgcctaaacgaagaaaaaatggtcagtcgcacgtttcgatatccatacctccttttcactcaccatctcctctagatggtcgccagtcgggttgcctcgccaagcgagatacatctctcccatactctcatccttatccatgaattcgacaatatcttgcttcgatcggtcaattttgggtccaccagctgacgaggtttccaggaacggtcgtttccagtcacttggaatctcgatcttgtcggaaccagctcgagacaggatcaaagggtctacttggttattgagtacgtccatcaatttctccaagggaatagacccgtcaaccatcaggcagacctgcagatgcactggttagtctagtttggacccctgagacatcctgacatcgcctacgttgtacggtcggtacgccttggcgtggaattctcgtactgagaaaatgtcaaagaaacaaaggtcaatgacccatgggcgggctgggatcacgccacgcctgttcttactttcttccactgtcaatttgcgcaaggcgtccaacatacctcccgtctccgaccggtaagcggacccttctgggtacagctccaattgcaatctacgtcgggaaatttgagatctcacgtggcagaggagtcaaaggaaaccttgatactcacttgcgagccaacacggttgtagggttctgttcgacaccttgcatttccgacatgacgacgccggcttcttcgccttttccattgatatgaaagacttcggtagtaaagccactggccgtgatcgtgggatacaggatgtgatccaggtagactgatccccgttgaaaccttgtcagcttcgtctaaagggtctcgtgcgggcgactgacttggcagcatgttcaggaacccctcgctgccggccgtggagattgtgtatgcggtgtctgaaccgttgccaaagtcagctcttatctgttctaccatgcttcattgaggctatagctcacggtcatctgctgtccaagcattagtaccatctcctcccgctcgattggcaagattgtcgagtacgcctttgtaagggtagttcttggatcccaaaaagatcaagtgttccagggtgtgagggcgaccagtgtcatcaaagatctcagtggctacggtgaagtaggcattggtgatgggcgctttgttgttcgcaaccactactgagaatccggtcttcttcgatcgatatttggcgactgtaaccggagcatatgccagcttgaactcggtgagctgctcataatcaccaagattgactgaagcggtggaagccattctcctcgaaggtgagttcccgattattttcctcgcttgtattgatatggaggggcgacccaacgctgatttcggcgtttgtaagaggttataggcgcaagagacttgtcggtatggaatccgtcgagcggtcgagatgaatcgcgagacgagagatggcctagcggggcgtaagggaacgcgacaaagcatgcaccgtagacagctgtctaatgagtccgtgaagtgaatggtacgttgaatgcaagcctcttctgatggacggagtctttgatgcggatgggaagggattctatgcaacttgaatgtaggttagagcaaccgatcgccggtccctgagcaaaactgagatggacgctgacgaggctgatggcttgtttacaaagtgacccacactaaaaccagttctctcgatctagatgtgagggtcttgatgacgacaaagtccataactctggtttctctcagcgacaatacgacatctttaagtaatagctagcggctgcattcaaaggccattgagcttgggacctgatctcgttgatcgcctcatgacgtcaaattgagggggcggcgcgggagtcatggatgatgaagtcctttgcctgagggtgcgccttgcaggactatcgttattcccgatgtcactagtattgcttggactgaagaagttgccgtttgcttttctcgacggggtccgaggtgtcgttgaagagctgacaggcgcgatgacagagccgctcgcagtcgcttcgaaggccggagatatggctcgccggggtccttctgacactgctgcgagaccgttcggcccatatgcaatatgggtgagggcggcagactgtgtctcatttttgggtaattggccgaaaggcgatgtcggtgtctcgtaatctcctcctgcgatgatcgccatattctcgcctgcaatcggtagcgcagactcctgcccatcgaccactgtgctagcgtttggttggagatccggtgtctccccttgaacctctaccgcttgagctttggtaaccgttttagattcgatcatgccatttttcgtcagggcaagcctttgaacgaggaatggcgtatacttcagccgctcaggcctgagctgaaggtatcctttttcagcttgacgtgaaaggtattccctgagtaccggacggtcaatgtgaatggtgtagtcgtccggcatgacactagggccagacccgccgctttgttgagtccgcgagacagcttgacgagcgagtccaccttggtctctctgtttctgctgcgctcgcttcttcctggccatcaattctgcaggttcatccctgatagtaatcatgtcgttcaacaccagcgtggacagtatatcctcgggcgtcatcgaggtcgatttgctgatggcttcgaaagtaataggcccagtcgcggtatcaaggtatcgaaaaagagctaacttccagtagtttcggtatgacaaagcacctagtccggagagaggtttctctggcgatcctgttcgaccctctttcttggacagaaggtaacctacggttacgagaccgaaagacggtcagtgatatcttttgggtaagggttttcaagttggttgacttactgaaatcgatgagcaaattgccccatcccttgcgttgtctgaccggtagcgtcatgatgcaactgacgttgtagtgtggactacgcttctctttggaaaaatagccgacaaaacgcgctccttcctcgtcgacttctgtcatgacgtaaaacaggaagggctctacatcgtagtatagtgtcttgtggtccagaaacattttcgctataagacacagattctgacagtagatctgtcctgagacgaatcagccatggcgggatctccatgagactccacgcgattgcaactgaccttgttcttacggccgtcgacctcgaagaccgacacaattccatcgcgatagatctcatcgccaggagggcaccttgcacgacatttcatctgaaggagaggcaaacatctaagaaatgcgggtggatagaatcgttcaattctgcgcacctgatggcgttccgcgatgaagccggatttcatatacttgaggcagtattcgcatagccataaacggccgtccgggactttagcgtattcctccggatagggcgcagtgtaccacgtatcaatgtcgtagatgccgaatcggatgataccaatcttttcggcggtgctttgcctcgtcgagactgggagggatccagaaaaaggtgattctatcgtccgcgaggacggtccaggcgagggggcggtatggagcatcaaacgatctctgagtgcgcgagaaccgccttgtgtttgaggggtttctggcatcgatggcatcccatatagactgcccgtgtcgctcgggccaggagtctcggtctctcggtctcgatcttcatcgtcacctccaaggcggatctgcgcgcaacgatcagtgaatctcgacatgcgcttcgaaccgaacgactgacctcggcaactttgcgcgtctcctcgaacagttggatatcggacggccctgcctgcgttttggaagtatcggcatctcggcccgtaatgatgccaccgaaagggacaggcggctcttcctcctcaacgggatcgcccattcgtgtgtcggtctgatcctgacctttgcgctttttgctcaaagtgctctgctgagcagacttattgaccatcgcgatcgaggggatcttgatcttcacgacggtcggtctctccacgggcgtctcaggagctttccgcttcgaatctcgcttcggattggggggatgcggtatcgaccggttcgccaagacttctgacatcttccctttaatgatggttatccttggagcaagctcaatcatgcctgtgtgcgatgttaatgaactgggtggtagatctgcaacatcttccgcaggggtctcgttactttcgatagcttcgtcaggcggcacgacattggcggtaatcgaggagggttcgattagggtgcaccctgggcaaatccattgacctgtggcaacttatgagccacatgctgtgtcaacagaaggagatcgaacataccgttcggagggtcaccaatctccctatgaacggcgaacagcgcttgatagcgtcagtatggtgtgcagaccgatgtgcaggctaactcacggcactaaacagctcttatgaaatcctgtgcaaagcgtgaggcgtcagcggcatcatcggtcggtcggtcgaagaccacattactgacctctgtcgcaggcatcgcacagcaggatgagcccctatgatacgcaaagcatctttagtcttgtgaaccgcttagagcagctataccattcctcacgtcgtattcagtgccgctgcacacctcgcaaagggtgcactctccacattgccatggatatgtcagggcgttcgtcgccaagcgttccgtgtagttgagacaagaggcatggcctaatgcacgatcgccaagttaggaacgcactgcgaagccgagaagatggaatcatgcctacctgtctttccgcaggtcgagcaggacaacatgatgtccatcttgccgttttccttcatgagaggtccaccgccgcacatcgcacacagggcctgtcgagcgccgttcttcaagctcttttgcttggtctgctttagccgattactggactgtgtctttgtgtttttggaaggagttcgtgtgtctttgcggggtctgccaggttttttggcggctggaattccgttcgagccagaagaaggccctgcttcgggagcgggcgatgcagaaaagggagtgggaaatggtataggctgttggcttgggtggacttggtggatagtgtcgtatggatcataagcccttcctgcgggctgaacatggatggtgtcgcttgtccaaggcattggtgtctgcatgttgtcgtctaggtaagggttctggaatctacgctcatgctggtcggatctgttagacaggtttccgtacgcattgtcgtcaggatagccctcgaagggatactgttccggcatctgttgctgagcttggccttcgttgtatatcccagaaggagcgtattcctgaagctcagaatcatctcttgtcagcggacgcttgtcagggttggtaatggttgtcgaccgtacatatgcagagccctgtgggtaggcattctcgtgtccctgttgcatttgcaattcatggtatccattctgagacgaggaccctccttgctcggtaagagcagggtcaagggcggccgtgtccgctcggccggagaggttggcatcgacaaaatcggtatcgtcctctccggatgcatcccggtcactataatcgtcctcttcctgatccatatgatattgtcaacgaccaggttcgaggaacgattggtgacgttgaggcaggaagtgccgagatgcccgcgaaacaaacgatacggcccgggccacgatttggcgataaagtgcttatgaactaggtcgatggcgtggatttataccggtttattatctgttggtcccggatgccggtctgaaccttgtgagcgagctagctcggttttcaggtcgctcgagatccggaaaggtctatgagttccgattctatctcaagaaggtttgagcaccaagatggtccagcttgccagtttttaatctgaccttgtatacaatctggcctcagtgaatgatgttatacaggacgcacgatgatgtagcaatgtagagggtccgagaggatcatgatcaagtcaagtcaagtagttagcgaggagtcgcgtcaaccgcgtaagcttcgtaagcttaagctagtagctggcctgggctagctaagttgaccgacatgaagtaatttgattgtcacacatctagagtccttgtacacttacacttacaacgcctctctcgaattatcaagctctgacagcgtcgagagtcctagcgagccatctgattgaccttggatcaagaaccccgaacccgttgccagcccatagtacaccttctttagcatatcgagatggaaggtttcgatctgcccatgagctttggcaagaagcctaccgcaaagaaaccctcaaagaccctggccaatgtcgcaaagacggagcggacagtaagccttaattcagtaaagatatacgattgctagatcgccacactgatcgccgagtccctctacgcagtcagactcccaaagacccgctagtacggctgttgccagtccagcttctggtccgcccgtgccgcttctaggggatggtgaggaaccagcttcggatttggccttcgggaagaagagacctttttcagagatggagagcaccgaaggctttgcggggccgagccgaacctctggagacggacttgcaggcgggaagaccacagtggacagtgacgatgacgacgaggacgacgaggaacctgaatcagacccgttcccgatcagtcacgaggtgatcctcaaggaccatgaaaaggtcgtatcagctttcgctattgatagtgctggagcgagaatagcgacagcctcgcacgactacgatgtcaagctttgggactttggaggcatggaccatcggatgaaacccttcaaatcgttcgagcctgcaggcaactatcaggtgagcttctcgaccgcacttccgagtttcgcaaagctaacaacaggacgaatttcgatcagatacatgacgtcgctttctcgcctgacaaccaaagtctgctggtcatcaacggctacacacaacccaaactctacactcgagaaggagaagatggcgtcgtcttcaacaagggcgacccctatattcatgacatgcgccatacaaagtcagtaaaaaaccgatctgcttcagaaatgcgtctccatcactaacgcgacaccgcttctaggggccacgttgcggacatcaccgccggaagctggcatccccgtcaatcggacgagttcatcacttcgtcgaatgactccacgatccggatatggaacactgcagaccgcatgaaacagaagacggtcattgtggccaagtcgaaagaacggggaggcaggacaaaggtaaccgcttgcgcatacagcttcgatgctaagatgatcgcaggaggtcagtgcctctgctctggatcgaccaagacgcctacattttgctaacgctgactggcgcatgtttctcagcgtgcgaggatggcacattacacctatgggccactaactcgaacatgtcacgaccgtcattgtcttgcgatagcgctcaccagaagtataccgaaacctctggcattgtctttgccaaggacgggagacaattggcaacccgaggtggtgatgatacagtcaagcgtgagtataccttgttgagcggtcatgccttccaggtcattgaatcatagcttaacccacttgattgctttgcttatagtatgggacatacgctctctgcgaaaacctcttttcacagcgactgatcttcctaatatctaccccgagacgaatatcattttttcgccggatgagcgcaccctattgaccggggtggcggtaagaaaaggggaagataagaagggcgaattggtggtcttgaaccgggaagatcttaccgaaaaccgtcgcgtgactatcggaaacggcagtgtggtcaaagtagcttggcacagtaggatcaaccaggtacgctgtatcagttcgtaaagagagtttacgaactacgcctgaccatgtcgatttcgcgtcgaggttagatctttgcgacgacttccctcggcgcttgtcacgtcctctattcgcctcacgcctcgatccacggagccctcctaccactcaacaagatgcccaggaccactccgagagacgaaattttcgtgcagagatctgcaccagtcattatcacgcctcatgctctgtcctcaatgcgagaccaggactaccgtcaaagcaagcgccagaaggaaaaggcaagaaacgatcccgtcaagagtcagaagccacaggaacctctggtcggagccggaaagggtggccgagtgggcgccagtgccactcagcacgtcgtgcaatcaatgttccgcaatactatgttggatgaggatgtaggttgtgctggcaggaaagcggtcgtaatagggatgctgagaaatttcccctatcacatagcctcgcgaagccttgctcaaatatgccgatcaagccgactcggatccagtctggacaggaggtacgtcgttttactccatggactcaagattcgtctagattgcttattaacatttgatcgatcagcctggaaacaaaaccagcccaaatcgattttctccgagccgataccggaagacgagaaggaaaagaaggagacgaaatgacgagcccttggattcgtccaagactgacgcaatctgtcgctatcattcgatggtcatgattatatcaagcagcacatagtccggctgtgaaatcgaccaggaatgaagacaacgggctgttggttccttgtggttggcttccttcaaaaaggtgtcgctgccccgctccctgacgttccgagcccaggagttgcgcttggcgtcacagccgctcctttctcctctgcttcctcttgtgcagccacctcgagatcgtcgagcggaacatcatcatcctcgtcttcctcgatgaatgttagacgatcttctgcaccattgaacaacaattgtctctcgatgtcagcttcttccaatcttgagacacgtatgctggggcggcgacccgccggagttgccggagtcgatattccagagggatctatcgagaccccactgcccgaccagtcgtctccagtctggaaggacactccaggtgattccgctggtgtgtctggctcgaagctctcccagggaagtattgcgggaactcgtccatactctcgcttgatctgtgctagatcaacgtcgtaaacgatgaatttgccttccgcatccttgccaggctcaacgaggcccgattgattccacagacggccggtcccgtcgacaagcgtttctccagcgtccaagtgtatcttttcatcagcaaatggtacagtctcccctgttgtgactgacgtgatggccccagggtgggtctcgacccttggcactgccgagcgtagcgtgcgcgggaaatcctggtagttgtaacgatggtctctaatgtctttagatgtgatgaccttgggcgcgggtactaaagcctctaaatcttcctcctctacttcctcttgctcgaaatccttttctgcctgggttcgtggtgagggctcatcagaatcctctgtctctgtaggcgttgcttcgatgtcggctggactgggcaacaacgcgccgtaccgaccggcgaggatgtctgcagcagtcaagatctgattagcgccgatgggactgtcatcgacgtttacgctcgcgttctctatggcgttcacgacctccttgtcggtttcggtttgcgggactcttgttgtcattttcggttgggcttcgactttctgctcagtagactcaagtgacaaggtggattctgacttcgactcctgatctgcaagtgctgaagcaggccttgcaagctgatcttctagactatcggccgcattggatgcatgtatcgcctccgtatactgacgtagatcatcacgcgcggactccgaagcgccatcaacaaaatgcagaggcaagatctgtccgaacggacttgtctgctttgagagctgtgttgacatggcctctgtttgctgatcagcagctcgtgacgattgtcccattccctctgtcgttttgggtcctatcgaacgctgtgtatcaggtccaatgctaggctcggtctgaaccgtggctggtgggcttcccaacggtgaaatcgcttcttttagtggcgagcccttcgcaggcgcgtgagtagtactgcccgcaactgttcgtgcaacaggacccgagcggactttgattgcttctccatcgacggcgataggtggaaagtacgaagaagaagagcgcgacagctctcgatttttcaaggacgaatccggcacaggcttcatttcgatcgcatcccgtttctccgcatcgttcgttgaatccttttggccttgcttgcgtggttctgaggcaccgttattccggtccctggtcggtttagcctttatgccttcaagacgtcttcttagtactgaagcatccacggatttaactttctgttggtttgccttcacgttagcttcggctgagtcttccgattcactggtggcggtagtgcctcggtctggctttgtagagcccgtcttcggactcttagtagcagctgttaataggggcatcatctgctcttgtcgaatcgcttcgtaatccgaaagattccccgcgaccatgacatcgccaagagaactttcttcaggatgggcgtcgcgttcgtaagcgctctggttcaagagcgcgtcttctcgcaattgagactggtcgccagtgagagataagctccgagcagcataatccctgcgctcgctgtgatcgctagcgagcatctcatactgcgtcgtagttctcgcacgcgaggtcacgatatctgtcgagtcacccgcagaatcttccagctcgctttgtaaaggcttgctaaaagaatcctggaggggtattatctcgagatcgaaagccaattcatccagctagaatgggatgttcgagtgagcaatcggtttcggagtttcagaatgactcttactatgtcaaggagccccagtgcttcatccctagacgctgtatctgttgactcttcccagcgctctctgtcgatcttctggatcgagttacgcgcaaccggtatccaacttagacaactggtcgattcagaacagtttcagataacagattgcgtcaacctgcgatcagtttctgcttactccatcacatcctgagtacctgcgttgacagtatcgagcccgtttccgatgatgtgtacgacagtgggatcgtctactaatgccagagttgtctggagataccccagaaccgcactcgaagccattttgatggacgctgggaaatacaatattcagtcgcgcggccagtccgtctgacagctacttgactaacctgctttaacggaatatcctctggaacacgtctgttgcttcacgtaatcatcccaaggctgtatgtgcacaccagggtgttcgaggagtacactcagcctggcaaccgaatccaacaagtccagctgcagctccgcgttggcgaattcgaagagttttgtagccctctcgtaagctggcacctgtttgagaaaccacgttccaagccaagcaagcacagactcttcatacgaatcaagcactcggtcttgcctcaatgaatgatgaccgactcctagatctttcaacacggctaagatgaggaaaaacctcagtccggttctcctttgaaataaccttctcagtacttacctaggcacgaggtcaaggaggacagtactcgagggtggaaactttttgagggcttggagcgcactcgtcttcttgtgatagcgtcactttccccggactcatccgtacggaccccctgatctcgcgtcgaggatcttgaccgacggtgcaaagggtgttgccgaccatcgccatctgagccagcatctcctttcgacagggcggaagcagacggccgatatcgatctcctgggatgtgcagaggggtacttggaaaaccgatgttataagcgtcgccacctacgtcttggtcgacgggttcagtaaaatcggaatgtgcagttgaagtaccaggagaaggaagctccgcataagccctagacttgggcgcttgggcttgggaattccctctaagcctttctcttgacctatcatccgaccgagatcgtgcttggtccgactggcagcttgccgattgtgacgctccccgtgcattgttcgcttcaatatcatctcgagaaggccaatcgaacgcttgaggctcgcgtttcatatcccagtcttgccgatcgacctccgagtctagtcgtggatggcgggattgattgccgctattgacttcttgatctttcacaggctcgagaaggtgaacgccgctttgaacgttgatgcgcgaggtcttaggtttcttcttgctgcttcctttcaaagcagctactcgagccaatagttcggctaccgatgaggtcgattccggtctaagatgcccgtcataatctgtcaagctttgttcttgagaatcatctagaatttgatcggccccttgagaaggcttcctttggtaggcttccagtaattgatacagaccttctttgcttgagcctgacaaggcaggcaactcggataaaacaacttctgacttgggatcttttcctatagattgctttaggctatcaatcgcagcatgagctgcggccttttttggatcctctcgtttggaccttcccggtagcttgttcttgacttgttcccccccgccggccaaagctgccgttttcgcagctgacgaggttttgctcgctaagtcctcaaaaggagttatacgagagggttcgggctcaaaaaatgttgcaatgtcgctcatgtccgatggcatttgtgaggactttcgtcgtttcgagcgcctgtcgcgaccaccgccggacccaccgtccccgccttcaccatcctcccctccctcgtcaccgctgtcagatttcaatgaaccaggctgacccatccctccatccttgatctctctaagaatttccaggatctctgcaagcatcacttctgaccggctttcggagaaagagcttcctaaactgaacaagctacttgatcgcgatctgcgagaacgggagcgtcctcttgatgtgctgctagagaacgacactttcctggacctcccgcgccgggtctcaggaccttctccatcttcagcctcggtaggactgatcattctaacgatttctcgacggaaacctccaaactcgttgtatttcccaagtaaactacgaagtgagaatttgggagtaggagggggctcccgcacaggtggagcggtctcgctagcgcttcctgtaggctctggcgcatttggattgtatgccttgtaagcccacatgggtggaagccgttcagaagcgaaatagatttcctatgggagcaatccttggatatataaaatgctccagatgtaaacctgaaaaccgatacctaagtacctgacctcgttccgtgtttcgctgcgccgcctgtggacgcggagcacgttgacaaaggaatgcagacatgcctagacaatgtcgggacgtcggcatcattgcggatccaacgtgaccttgcttgtaccatcttgcgagagcatataaggtaccaatgccgatagaggaagttgtcttgtgtctgcacttgcacaaaacttgcacaaaagtctaaggtccacacatacccgtcaagatcgcccagttcggcttgggccgattccgcgtcgccacgtcatcatcatcttttatgccagtgaccccggcagatttaaattgataagtgccatccccgccctacagctgacttggttgcttctcgacagacacatcaccatcaaccttgccctcgccgctgggcccacaatatcagtctgctcagtccacctctggcaccacctacaccgtcagatcaaacacagatacttcccgaacatcgacgcccgtgtcattccttcgcaacactgttgcatcctcgcggttccttgattacgcacctgtcgagagcgatcatcaaactcgacgttggacttcgtactcgtgcagaacttgattgccctgtcttctatttcctcgcatttgtcgctctacaggctgcgtgtttcgaagaaacatcagcatagagcaactgtgaacagacttgattcctagcaccgagcttgcggcttgcagagtaaacctctcgtcgagtcataacaagccgagtgttcagcgatttaagactagtcttagttggcagtcacacacactgtacagcagagacggcaaagcaaattcgatctcatcgacttgtggtacaatcgtcaggtaacatcaggatatactactgcagtgtaagcagattcgcctcgtagtttggagcaactgccacacatgctgaccgacggtctatcgatgtctcgaatagctaccattggactacgttgcgggacttgtcggattgaacgaaaccttcttctctacttagatcgatacttcgagatcaaaacaggtaagcaaaagtgtcacccacccagtggaaatcacgctctattgcctctttgggaaatgttgtcgtgatggggaacggaggtggcgaagagagtgatactatggcatccgaaatcgctttcctgagacttgcagtcgacccagactacttggattgccgctttgagacaaagggcgcaggggtaaaactcggccacttcatgaggcaggacgatgcagaaccgggagcaaaatatatgccggcattttctcgcctaagcgcgcaggatttgcggtgcgcttttagtagatgtctctccggctacagacctcgcgcgcgcgtttcatgtcatcatgaaaggcccgcaaagccccatcgctgcaacccgccctgctcctcctgtctgctatacaagagagacacttgtcaaagacaatgtttgaatgcgaaggctgacgatcgccgacccgttgtgctcactaggatgtatcccgaggtagaacacttgtcgcccttcggcaacgcgttcacggaatatccgaccgacgcaaacttcttcagcaatgatgccctcgacgacctcgacattgagtgagtcaaatcgaccgatggctttattatttcgttcatgcatgctcacatattgtaaccaccctacaacttagtcccgagctcttgatggacgatgaacagacgcctgcactggctactggacaggaccaaccttggtccgctcccttcacaaacagttacaatactactgcgcaagatctgtatcacaattccacctcttcttccgcttttaccaaccctcttgaacaagctattatgtatcacagccagcaatcgacggctcagaatggtggccctgtgcattcgaccgtatctcccgctcagttgttccaaccgcctgctcgcatcgcggcagcatccaggtcgccccctgcctcgtccaccgtgtccagtgctcccaagagcaaagactcgcgagcacgaaaggcatccgtgcccgtcaaagcggaatccacccagaaagtcggttcgtcttcgacttccaaactcgctcccaaaagggctgccagtgcgactcccccttcacctccgccgtcaatcaagaagaaagctgccgagtctgttgactttgacaagatcaagaaggactacctcaatccgaacgcgaagtatgggtggcatggtcgcttcgaaaagggcaagcccaaccctttggacgagatgacacgagccatttcggagaagaagatcaacatgaccgctgctcaagccgccgagtttgctagtctcgcgtactctgggattcccacggcctatacccgaacttggcaagatcacgacggcgggctcaagcttctttcgacgcttcttcatcgagccgtagagggtttgcgcacctcgccgacgggaaagtgggtcgaggcgtcctataaattggttgatgtgagtgatagtgatctgaaagcctcgatcaagtccggcactgacatgtcatctgacctgcatatagcttctcaaaaagatctccccgaagttgcaggagttgggcacatatgatcttgcctcggccatcaaagcgatccagaggactgaaggcattgacaagggtaagtgccctactatactccatgtcgggatagaacgctaatttccccattcactttatcgtcctagagctgaagaagtttatcaaagccagcgtggagaccttgaaagaagcggcggaggcatctgaggacacaagcgccgcgggccagaagcgtgcagctcctgaggctgaacaagatgcccgtaggtcctacgcatcatggtaatgccgtcatacacgcatcaactgacctggcatcttccatctccagcggtaaagaggtccaagcttgacgcgcaagccaagcccggtcaatccagcggatcaggcccaaccaagacggttgtcaaggtagcgccgaagaagaccgacaaagtggacatgtccgcattcggcctcgctccaccgcgaaacagcgccggcacgcgacgacccgtccccaaagccgatgcggtcagctccctcctgagcggtctcaacagtaccatcatgaacggccaagccaattccaagacggtgctgaacaccgccctcgagatcaagcccagatacaatggcaagccccgcaagaccgtcagattccaaccggatgacaagctggtcgcgattcagtggatcgaaaatcgagacgatgatgaatatgaggtgagttgttactttcatatcgatgttgcgtgaagatgacggcactaagcacttccgtctcatagtctggcggtgcaaatacgacgcaaatggaaggcgaaggcaagtttatgaaggagcatgggcgactggaagaacaacaagattggtacgaacctttaggtgagtcgtgaaaattaagcagccaactgcgatggatgaaggcgctgacctgagttctgcgatgttcactcagcgttcgatgtagacgaacctgtcgaacccgagaacttggatgctacctctacggcacgtacagccttcctggagtctctgcaaggacgagccgttctggacgacaatgcgccaggctttacggaggtacccacttatcgtgatgtccaatcccaaagcatgcatggggacccgatggaatatcctgagcagcctgctcaggctatgcccccactcagccagcagccggccgatctcaagactctgctgtcgcgtttgcagggaagcaacagtcctgctcctcccgcccagggcgcagatttcggtgggggtaacagtcacggtcaggcagctgtccaggccgctcccgcaccaactcttcacatcgacatgggcaccctttccaacattttatccaaggtcaacgcacagaccgtatccgcggcaagcgctgcccataacccttatcatcagcctcccatgaacttgaatgcgcagcctgcttataatttcaatcaattcaaccacgttgctcaagcgccgcaaagctttggctacaatgcgtatcaagacgccaaccacatgtcttaccagcccaacaacacttggatggcaccgcaagatgaagctcaaccgaatttggcaagggcgaacaacgggcgacagggcaaagaccgcggcaaatgttacgaatttctcaattatggcttgtgagtttagccacagaccgtagtcgtgatctttaggctcatcggacgttcttcatacagctgtccccgcccaaaatgcaagtttccgcatgtctctgctggcagctgaacgaaagtgccgacaaaagatccggctaccataacgacctcttacgaccacgtcgtacgcgtgctgtggaattccccttctacgagcgagtgttctgcatattgtaacatgaaaagttgtatacgactgccattcaggctctatatacgctccaagcattagctatagcatagtgctggtcttgatattcaggcctgtcaagagcagaagccgcaggtcgtctcgcgtctcccgttccatagtcgtactgcggagtgtaccgattgtgcgcctcggcatactcggcttcctcatcatccgacaaatcgtccgaatcctctggaaccgtctgttcagcatagacctgtaaatggggagtcgtctcgggaatcgccgcgtcttgatcgtctactgtcccgtctgccttctctttccccttgcgtttccgaggctgaggtcgaacggttgaggcagtctgatcttggttcgcttctgcattgccttctgtagacttggtcttggccttcttttgtgatctcttgggtccgactccggcttttgcatagtgtttccgtttgtgatgtcgtgccatgagctcagacaaaacatcgtcgggaatctcgggcgtgacaatatcttcgtccttgtgaataaacctgatccgatgcaattcctcttgaggcattggaggggctttgggtgcgcccatcgtctcgagatagacttggatgttgggtgcagtcttggccgcattgagcgacattctcagcttgtcctgattctcgtcgagcttaagcagcttgagcaatccactggaacggagacatgagctgcagttgcaataaccttgacaacgagggcagatgaaagtccggctgtattcctcgaacggaaagttgtacctggatgatgataagttctggtcaggctgaatgttattcctagacaaagttcacgccattgacgtacctctgcacgcaagtgttgcagtatttcagattgcactgtgggtccttgttcctgcaactcatcttgggtttcgtagacttgcgtcggcactgatgacaagggtccccgtccaactgggaataatgcacaggtggcaacttttctggacgtatcttggcaaccgaggcggtagccgcgacttcaaacggctcgtcttcggattccgtctcgctttcaatggggttttcgggaacaggtggaagttgactgtagcggaacaagtcttgaacgcgctggcttcgaaagacgtggggaagttcgatgtaggcgagtcgttgacgctgcccgattggacagggatcagccgtcgtgccgtcgggagagtagcgaggctcgcgtttccttttgggaaccttgacaggcggccttcctcggccacgcttgctcggtctcggttgagattcctctgggagctgcagcataggaaaacgaagtgagtcgaccggcatgcaggacgcgaggccaaacggagaggtccgacttgccggttgaaatatttcgccaagccccaaggcggccatgattcggttattgtgagctatccgagcctgcctctgcgcctcgtctcaagggagggcaacaactcggatcaaccttccacatgctggctcgatgtacaccgccgcgcttacaatccgcctcttcgtcgatctcggcgtcgatatcgccaaacccactgagatcgatatccatcaaagcaccccgtccatcgttctcggccggcctagcgccttcgaggagggccagtctctgagccttttcccgagccgctcttgcctcctcccgagccgctctcgcctcctccttggcctctcttgccaacctcgcttcttccttgcgtttctcctcggctgcccgagccgcctctctgaccgccgcctctcgttgtttgaccaagatctcttgcggggtaaggtcgcgaatcttgccgtatccagccccctccctcaacagcgccttgtctcgttgcgtataagctgccacatgtgccgtcaatgaattgaagggacccgccgcggcttccttttcagcttgaagtgccgcttctgccgccgccactttcgctgcggcgtcggcttccaactcggctttagtcctccgacgacgtgagacccaacccggttctccctttttcggttcgggttttctcacccggacgcgtttgaagccttccccgttgccggatgcgtgaggttcgcttccattccctgcatcttgttccgaaccttcctcctgtgcctgtgttcggcccgagacaggtggttcgccccctgtctgttgattccatgtttccaattgccccggctcggtcgcccgaacgagggcttgcaacctcgtcgaatctccctttttcgcggcattcttcaacaggctcggcgagatcccatgcctcgcggcgtgcaccgcctgatccttctccttgtctgcccctgcgtcccttgaacgagtcccgtttgcctgtgctcgtcgatcagactcggtctcgacgaccttgtatgcccatggcgtctctaccgcaggcgcttcgtcgctcagcccgatgatacgttcaaagacgaacgggtcataagccggggaaggggctactgggtatacgtcgtcttcctgtacgggaacatgcccacccgcagtaggtcggacgataggattctgtagatgatgttggctcgagccgttggcgtagcgtgtcgacgatgactcgttgctactggtcagaggttgttccgctcgatttcgttccccgacccaggtttgaccgagtctcgtaggagcaggggcagcattggcagtgcgtgacgagtgggaggacgtgtttgcggaaggtgcaacaggcgagatactcgtcgccgtcgcccgtgggggtaaagtaaatgtctgtgtcggtccactcgaacgccttgcaggagggacgagacgattcgtccggttctggttggtactagccgtctcgggggcgactcgggcgggcgtatactgaggggagattgaggaggcgggcgcagccgtattattcgtcctctccaacgcctgacggggaggatggtaatccgctcgtcgggtcaccaaggaggaagagggggtggccgtcgtagcttgtcgcctttcaaacgtctgaacgacctgactggctgagacgagcgcagggaggccagaggcggacgagtctctagtcggagggtgttgaaggtgccggggtacgtagggtcgttccccacccgtcgccgttgttgttgtcgtcgtggacaatccgtatccactattcgccagagatcccgtggcatatcctttgttcatcccagcgccattatattgtgcgtcctctggcattgaacggtacccggcaatggaagcggccgaggttggggcggtgtgattgttgccgaccgaattggcggagaggtattgctcgctcgatccgtaaattgcgggcgggtctgctctgtggtgtagacgagaatcggttgctgtcgttcccgtggtagtgtaatcccttctatcggtctgttcttgctcgtacctcgatccgtacccgttgaccactcccggtacggcgatgcgatgaggtccgacatcctgatacctcgtgccatatgcttgcgaatttgacgaatgctgctgttgagccgatcctccgaattgattcgagacgactagcctaggatcagtagcggtagtctggttgttcctctgttgagcgtaggcagaagaggagggttgatggtacatcccgttggacatgattgctcgacggtcgccgataactgagtcgcggtcgcatcggtattgagggttcgagattgaagccgagagcaaagcccggcgcttctcgagagtatggagtcgacaaccggtatgtactagtccttccctcagctctcagcaagacactgtgtgtggtagcaaagatggtgtagatgaataggttgcaaggacaagtggtgcaagccaccttgtcgatgcttcttgatgaattgcaagcgcgtacaaagtccaaaactcgaaattggatcgcaaaaatgagaaacaagacaagaaggtgttgaacagatgcaagatggcaatgcaggttacagggtatagatacgtacatgacaacgacgagtggtttgatagtggatacaattgtcaaaagtgaaaagtaacgtggaaacggtgggcccgatctataatgatgtatgagtgcgcaagaagaaagaacaggtccgattcctgagcaaaccgactgtcgaattaaacccccgtagacctctcctcctgaacttgagcgatatgccagatgatccccgcttcaagcgaatccgggtcttgaaggtcgatcagcatgtcactctgcgaccgcgctcatgtcagcttcaaatcggggattctttgcgggaactctcggattgcgcaagccagctcaacgtaccttgacaccctgcctgaagaggacgaccacgggcccacgttccaattcgtcggcctgtacgccgcacttttcggccacttccctgccctttcccacatcgacgtcgacgacgaggtaatccagatcgaccttgttctcgggcgtctcctctcgcgccaactcttcaaacttttcctcgatcgccgagatcgaggtcggggacgaggatgaccatgttgatgcggacgaggaccgacggaacaaggcgatcgagttggggtgcgaggcgaggcaagcgtcgaatgaggtcgggttggtgatgatcatcaaggacgacgccgacgatgccatctccacgccgacgtcgacggtcgtactagttgtgggtcctgcagctttcccagcgatccctgcgagtaaccctccgattcccgccggaccctgcgttcgtccttgtccctcgttcgagggcccaccgacgacggccgccccgcccgacctgcccgtatacatggcatcgatctgcggcttcatctgtcttccgaacggggtcgacaagaaatccgcagggagacctgtccgcacaacgtaaacacgtcgacaagtcaggattttgccccgtatcgagtgtgagggtacgggaaaaggggttgacggtcagactgactgcttatccaactagggatggaacttgccgtcaaaaatccgacgacctagtgtttcaccttcgatcatcagcaccgctgccatgttcagtaatctcgctatcgatcatcgccactcacatcctgggtgaacgaattacagttgaattccaacaagtgataattcccggatgtatacctggatttcaagtcggccaggtagtcgtcgaacacttcctcggggatctctgtgggaccgcaagggatcacgtgcaagggttgtccgtgctgtgataggttacgtgggtggagcaaggggtcaacttttcttatttctttctagaaaaggtggaaaggagcaaggggaggaggttgtgagtgctcacatgtgatctccctgggagggtctccatgatcccggctccataaaagatttccctgttccacacgacgaccgaagtatgcctgccctcgtcgtcatcgtcgtcgacggtcatggtgtcgggatgcacgaagaaagagaggttgaaacccaatgatcagcttggagtcccgccacggcagcgcggccacgatgatgaagaggcaatgaggtggcagcagacggccttaccatatcccatcgatctgtcttcctgtcaacggcatgctcaacgcttttgccagtccgttcgaaaggtcgtacacgtagagcttgacgtcggggtacgtcatcttgaaagcgcgttacttggggagtacttgaacctgaccaggtgaggcggtttgacgtggggtagaatggagtgcgatgtgggaaataccgaatcgagtgagagttgcagatctaagaatcggaatggtgtatttgttgatggtatcgatgggctgatgcaagatacaaggtgatatgatcagacgatgatgaatcgttcgaggtgcccctttttttttcctagcaaactactagttgcttgcgcgctgacgacgacgacgacgacgacgatgaccgaagctagagccagaatcagagccagagccagggtgagatggaccctccatgtcatgcattcagacaacatcgagcatcgttcatcatggcactgacttgttgcgagtcgactgtaagaggtgcacttgttcgttaccttcccattgttgtcgtctcgtccatgtcgtttcccccctttctcttattttggtcctcatcgaccccccctgccgccttcgagcgagatctctctgatcgagacatcatatatttcatatcatcacccttgaaaccaatactctccgacctcttgataacgatcgattcacgaacgaccacatctgtcactcaagtcaaggattcgttccgaggtacatcatatcgactcggtcggatcaacaagctgcagctgcaaagacgcagactctgcttggtcacgcacaccaaatcttgaacgtgcatccattgccatcacgatcacgaccacttggagttcaacccccctttgatatcgacagcctcgactaacgacgacttgcctccctccctacctgaatcatcctctgcacctcattacgaccacggacgacgctgtagacccttgctatcatgccccaattaccttccaccccttcgacatcgacgaccccgctcgccaacatgcccacccgtatgcgtatcctcggacaccgaggcgcctcggctcacctccccgagaacacgctcgccagctatatcgccgccatccaagaaggagccgaagggatcgagtcgggtcagtcgatcacgaggcggatgaggtcgggttgatggagttggctgatctgaatcagctaccattctcttcactccctcgaacagacattcataaatccaaggatgacgtgagcctgattgtccttctcccgatctcctctcctcgacctcgactgggatactcggtagctgatgccccttaccttgtccccctttttggacccgtagcgactcttgatgttccatgacccgacgttggaccgtacgaccgatgggacgggcaagatcagggatcaggactggacgggccagatagagtgagtccccgggctcctcagggctgttcgcctgtatagcgaatcgtctccagtaggctaacggaagggccgaggtaggcatgtgaggaccaaggcggaaccgattcagccgatccctttgttcgaggaattggtcgatttgctcatgaaggtgggtggtgacggcaagcgacgtccgggtacgggtttgcactgccagctaatgcggtttcgacgccggaacgtcgttgcatagcccgagaaccggcatgtcatattgaacgtgggtcactttccaaccgccttttgacacaatcgcaattgactctctacccgcaccggcagatcgatgtcaagatcttttccaacccggacgagatcttccccctcatgcacgacgtcatcagctcgtacccttcgtacgagaccgacctcagcccgcgtctcatcctcggactttggcaccccctcttcatcgcacctgcccagcgctacctcccctctctcaccagatttcacatcgggctctccacccatatcgccaggaaatacttttgggaccacatggacgggttcagtatcgctttccccatgctcacgagcgcggatggacaggcgtttttgagggattgcaaggccgcgggcaagggcatcatgacatggaccgtcaacgaggagagagatatgcaggtggccaggacgtacggcgtcgaatggctcatcaccgatcgcgtcgggtttgccgtcgaaaagaggcaagaggtgggtttcgacggcgtcgagcctgggtcgtccgtttcaatgtcatcagctgatattcacacccttctgaccgatgagatagtgggagaatgatcctagtgtgctccagatgggcatgttggaatactttagatggagctggttgaattggaaacactatagtatcccgcaggtaggtccgatccccgatttcaatatgcggcctcggtcgacccttgcgctaacctcgtctctttcggccccctcgtggacgctggcccattacgtccagtccatgtttctccgctatttcgaggagaatttgacgaggaacgcgttcaaacccgggccattggaagaggtcggtgcgcatcgagtgcccgctggagatgacctgcgggtcgaggcagaggagcgggcgaccaagcagagcgaggggatcctggtcgatgtcggtcgttgatggacgaccgagcccagctctgaccggtgtccaggcgagagtacacgatggatctcgaagggatcgaccgggagccctgatgaggcgagacgtcacgatcattcacgaaccgtatggacaatagagagtgtcgagggttttgtatgtataggtcttgtcatgcatgatacgatagattccggagcgcatctatagcgactccgagccgctcgtccgggtcgtgctacatcgccctcattggagatgcgcccgccagtgaaaaacgggatcggttgctcgtgaatttcatcgcatccatcttcccgggcgaggtggtccccgccaccagtgatgatggatcgagagatagcgtccactctctcggaccgatgcaagatcaagaggtgcttattgcgataccacgactcacgtttgacgccggaaaatctggctccatcacacacttatatccctctcaactgattgcgaccaagtctcaggttcgaagacggagtgaaacttgatgcgagcgtcaacgagcgcctggaggtcgcagcgttctagagcgtttagtctgcatggatgaacgcagatgaccacctcgcagaggttaacggggtggacagggcagacggagacggcacccctgacgggacagggcgatcgaccgcgagctgcgagctgcgagctgcgatgaaacaagcctcggtcgtactggcccattgaaaacggggtggaccgattagtgaccgagacaggtcgagggtgttgtcgtacggagagtttcttctttaccaaaaagccatcaaagggtggctcgggcagcgggcgacggggaagaccgaggcggcaacgagcgggagtacctgagatctcaaggatcgacgacgtgggtctggcgtggaataggcagctgcatgcatgcgtggggcggagggacggaaacacaggatcggtgttttgattccgaaactcgggtggctacgggatggttctgcgtgggggtctgccttccggtggctgtcctgctttcccttttctagcgtggattcatctcgacccagttttcgcgcgcacaggtcgaggtcgaatccaggtccggtactctgccactctctgtatctgggatgaaccggatgttgcgcatccaccgtggccacacccgaccttgatagacgtattggccattcgtccgactaggattcgttgtacgagtctggagaattcatcaaaaatctgcaccaccgtcacaccgcatttctgtctttacagcctctttgcgtcttggaaacgtttgaaaatagcaaaaacagacgaccgaggaagaaaaaacaaacgccacttccgagcacgagcgtagaagttggaccaacacaatatcattcgagccataccacactacttttattgcacccttgacattgcacatcgaccacctggcccggaccacgtcacacatcgcaagatcgtcatcattgtcatattcgctacatcattattgcaggacctaatcgttgcaacgtaccacatcgccccaagacaacacagccaccacccgcctggattcaatagcccctcacgatggcagcaaccagctcggacgctcccggattcacctcgcccaacaacgctccgtccacctctgcagctccagctgcatctacctcggcacctgcagctcccgcagcgacgtcgtccagccaggctcaacccgctcctgcagcgtcgacctcttcctcggtcgtacaggcggctaccacacagcagcaacaaccggcgacgacgagtaccgctcaatctgccccgcagagctcttcctctcaacctttcgcccctgcatcctcctctgcggctgctacctcttcctctgtagctgcagctggaccagtgaccgccacctcgacgctcgccgcttccacctcggccgccaccagttcatccgcagtcaatcccgcagtccccgtctcgacggtgacgacgaccccgactttctcggcctcgtcttcggcatcctcgatctcgatacctacctcgacatcctcgacacccccagcaccgaccgccaccctccgtgccaactcgaacaccctgtctaggtcacaatcaagcaccctcaccggatccgggacgaacactggctcgcgcggtgcgaacggggctgcgggtttagagtctaaatccctctccgggggtgctatcggagggatcgcagccggggccgttgtcgtgctcttgctcctcggtctgggagtctgggggtacaggaagagaaaggcaaggaaggatcgggacgagtggcccttgccgtaagtaccactgttggtggtgtttcgagacccatgtcgagacttacatgtctggcatcgcgaaatggcggacccccttttgatagacctccacgtgatatgatcgctgccggcgggacgggttacggtggagggtgggatgacaagcccacggccggggctggggtggctagtagtaccggcatgctcgggtacggcagcgggtcgggcgaaaagggcgggttcgataggagtacttcggctcgtaagtacaacaatgcgctcggtctttggatcacggtcgcgaagggttttaccaccggaactggaagctgactttgtctacgtgtaacgatactttgcgacggcagtttacgtaccagggcttccggcgcattatcctagctacgcaaggaggacgtcgacacaacccctatcgcccggttcggggtcatccacgccggcattgggaccagcgttctcgtatgatcaacctctcgccccgatgatgatgcccgctgcggctgggcaggggcaatactaccggccctcgtccccctctcagcaacagggagggactggcgacttcgcccagggaccctttttgttccagcacgaccagtcacccggaggatccggtagcggttcggggtcgaggagcagtacgcccgtcggcaggggagtcggaggcgggtccaactcgaacttgcggggcgaggcggtcgtggaagaagatccttcggaccatgtcgcttccggtcgacgactccccccgccgattcagacgaccgggttgaacgacgtcttgatgacgaccaacccggacgtctacgggtccgctccgtccactcctcggtcgagttcgaggcactcgtacaacccgcaacacgcctcgcaagggtacgctcagccgtactacccttcatccgcgacgacgccgacgtatccacagagttcgtccaacccgagcgtaggaccacgtacgagctattcgcgtcggagcgtcaaccttcagatgcctgcgcccctggatcccaacacccctaggcaagggtacctctcgcccccgacttctcctcgaccgggatcgatgtacggtctgaacgaattcgggagttaccagaaccccaacgcgtcgaggtctagccgacctggttccggttccggatcggggtcgagaggcagcggatcttactctccgagtggtggggagagcgtgcatagctcgacgaggttgcagggagggaaacgagcgtcagcggtagctgggttcggagggcacggggtcagtcatcagcctagcacgtcgtcctccttggcgagcggaccgagtggggatggagacgaggagacgacgagggcttcgtagcggggttctaacccggttctgacgttgagacgagaatgtaaatcatagttgggtggttttcgggggaaggaggcgtattcatcataatcccatttgaacctcgacgagtttcagcgctgtgacatgctacgcctacgccgcgacttctgaatgctctctttatgcgcgcgctagatcttccccctcgcctggcccccgcgcgcgtgctcccgctctcgcaggtgattcgtcatcgcccctaaccacatcgacctagccccctcctcgtgcagcttgtcgatcatccatcagctgacatcaaccaaaagtcacaagtcgattgggggttgggtatcacgggaacacacccaggtcgcacgggcaacccgcatgtacaaaagcatcgcgttcatctccacaagcactttgaacagaacatgcattcatgtcattcgttcactcgcgagtttcacagctggtcagacaatcaaccatgcctccaacgactcgagcgatcctccgtttcggagacgaataccaagcttacctcgataaagagtaccccatgacagataaccccggtcatccggtatcgaccgtccggccttcccaagtcctccaattcccaggagtcacctacgaatccaccatgatggtccgcaggctgatggaagagaacgacaggaggttcaacatattcggtcgtccatcctgtatgtagaccaatcgactctggttccacgtctccgagccggaccgtcagacccatgctgataagtgtcgtcttgtctcggttctcaatctctcagtcgcgcataatcacttgccgcatcacatccttacggcctattccctcggagcctctcccaagcacctacaggccacgttcgaggccaacgtcaaggcgatggcgcctcttcccgtaccgaccatcgggaacaaggacgaggagaaagacgtcaaagacggtaaagacgcgaagaaggactcgcagaaactcgtcatcgaccagaacaactggcacgataccaagttgctcggtgtcaaagagtgagctcgtaacaccactgcgtgctgctcctgtcgatcttgccgctgacctgctcggctgacatgcagcaactacccagcctacctcttgttcttccacaaagagatcgaacgaatcggcggtatggaaacgctcgacaagtactttttctcatcggccgccaattccggtggaaaacagaacaacaagggtccccgaatgttcgttcgactgttctctggagcgttccatccgtggatccatctcggattcgccctcgaattcagggatcaggtgaccctcgctgaagcctttgcgcaagcggccatccatccgggtgaacagctcggcagcgctttcccggacaattggcctacggtcccttcggcaaagagtcacgcgaggaggaggtcgtcacagaccatcgacacggacgcctcgttcatcgacccgaggaggactcaggtgtcggcgtccaacatgacgggcatgctaggcaattcgcattccaataccacacccttgaccttttccacctcggtcaccgcgggttatcgcaacctcgcgcacgtctccctcctcgagatctatgccgaactgtgcgattccaaggggatcgaattgcccgcttacgacccggacctatcgatcaacgatcggatggctgcggtgttgaaaggagaccagggcgaaaggattcgcaaggtcgccgacaagtgggggttgaccgagggagagctggtcaaggcgggcgaggcggacggatgggcgaggagggtggaagagttgcacgtcctctgtaccttgttggcagtcgggaccggtcgggttggcaaagagaccagggtggatttcttcctcgtcagtcgatccctatcctcaaaggggatgacgagggggaaatgtcaaagctcgacggctgatcgagcgtttgcccccgtcttttcttcttctcgatctcgatctcgtttctctcggtacagatgcactgtctgacctcgtcaatcttcctctcttcggtgcttgttcacctgaccccgcctcatcggctggtcatcttgaaatcgtacctcttggtcgtcttggtcaccgcgctgtcccggggtcgaccccggatcagccccgagctcgtcctcgcgcatacggcttttccctcgccacgcaaggtcgccgagagcaacgacgctccgggtaaagacgtcgaggggctgaacgacaagtccgagacggtaggcaggatgcaagatagcacgtacggcaacttttggaccggcgtcgtcgataacgcgcttcacgcacacggcaagtcgatcgaatgagatcggatcgcgcatggccgagtggctgaaagtcgatcgttcctttaaagattcgcatgtcatcaaatcggtacgctcactcctcctctattcccgactctacggtcatctccctccaggcggccttttgggaagttacaagggcaactcgaaggacgagactatcccgggaatctcaaagctcggcggagatctctttgctagagcggtcgccatcatctttgaacagacgggctgggctctggaccgagtcgacggtggagacgaggacttttgggactttagcgcgttggggtatgatgaagcatggaagaaagcgaaagacggcgaggaaaagaaatgaaacaaacgtctagacctcgaccagtctgtgggcacttttgatcgttgtatacaagcaaagcaagatgaatcacgatttcgtttgtttcaaggttaagagtcggctgaaaatggtgtgggacccatcaccgttccgggatctagtggtaaggatgatcgtgaaccagtccacgagcgacgatcctatgcaacgggcccttttcctcaggctgaccctgcacaaccgtagacaaatcctcattcaacagttcatcaagccttcatcccaggtccaagataggccctatcgatccccctgagatccctcagcgaagtggacatgagccagggtcaatcatggatgacctcagactgcgccgagcgtctgcgccgcgtagagtcgccttggatgcacagaacaggatcacgaggactcccagaatctttgatcattgtcatagtgatgtataattctaggaacagtcccggttcgtcacttcggtgctcacatcctttgggattcaggggcgtcgatcctcggtcggccgagaagattgcccggatgaatggtcgtggcaaatggctcatcatcggctcggctcggatcatcatcgtcggcatcgtcaacccttgcaatcatgaccaaacaaaagaatggtgcatgatgatcggatcaagaaggaaagaagtcgaatggacttgtaatcgcaaaccatgatgaaatgtataatatcgcgcagatgctgcggtcatttctctgtaaccggtgcagcttctgaacaacatatcagcatcaaagctatatcacaagccatgtcatcgcctgaaagagaagagatcaaaccggatgtcgcccaatcccccagtgagcatcgatcctggctctaatccttgctcgcattcctgaccatgtcgcaagacagccaagaagcgtaaaatcaaggtcgacgaggacgacgccttttctctcccgaattcgcctagtgagtctctgtcagtaggctattcgagcgtgggtgctgtctggtctgagcgaggatgccatcgaaaccccgcagccaagaagggcaaagcaaacagctcagctgctacgaagagttcaggcgcgaaaccaaagggccgccagaccgctccggcgatcaccccggagaactgcgatccgcccctcaagggcgccagagaccctcgcctgaccgtcgcttatttggagaaactcatcgacgagagcgggccagagggaaggaaagagattgctttggcgtttggaatcaagccagcggattacggtcaaggtgcgcgggctcgcggcgcgctcgatgggcatgaggctgataccgcgattcgcttcatgattcaaatcagcctgggcggataccatgaaggtgggtttggacattcaagatctgtcagaaacatgttagcctgttcgactttacttagattttcgcccgcgtccagtttcgtgtcaagaatgtgatccgtagcggtctcttgggcaacgcgaccggttaaagcacgagccaaggtttcagtcgcaagcttgctcggcgtcttgtcgcgagcgggttaaggcggaagggcgggcgaggtccaaacgtgaaaaacggatgctcgtatcgcgtatcttggaatgtggctatcttgatggttttgctgacagctgagagcgatgatatgatatggtgtacactaagtctactgagagatgagagagcaagtgagaaacgagatctcgtctgcgtcctctttactttcttgtttgccgctgctcgtagagtatatccgcatccgagattacaattgttcttttcggaagttaattgggaaccgaccacctggcgagccaacgggaggagcgggggaagggtagagtagtagtacactcgctcactcactcgctgactttatcaaacacgtccgtccatccatcctgaggcttgcaccccccaccccccagatcattcatcttggcaagcagcaggcagcggcgttcatcaaagggacacttcgtaacatggtcgaacccaacatcaaaatggcaaacatgacacgtcgaggttccggatcaccacgcgaatctaaagactggaccataatgaccgcaatagacccggaacgaagaggatcaggtgtcgctcccgagacggaacgtttgatggctcctctaggtgatctcgatcctggcacaccatctcatgatcaccatagcgatcccctgaccaattcctggggtcgaagaacggcaggctccgaagctccaggacccttcaatcagttcagctttcccacctcgcggacgagttccaactcgccctctggtcgcttctcgttgatcctgcactccaaattgttcaggaatgtggcagtcctgacaacggcactgctgctgctcgtctctgtcttgcatacgaccaagcccgaggtgttgggaagcggactgcaatacatgagcaaagtccccgggctctcccggttggctcaacaggagatcagatcgctggatgagcgtctgcgagatttgatgacccgcccgatcttggagcaatgggagatggagttgacaaatcgataccaggcaagtcggtcctttaccacgccttccctgtctctatttcgactgaccgcaatgaattgcttcccacagtgccccatgtacacgttctctaggtcagttcatgcaatcacattcccatccacaagaccgaactcaagccgatccgtctgccctgcaggatgacatactttttccacgaggggaaggaagaacagtggaaatcgattggtcgagacgatattcgaaagtaccgcaacaagatgatctcgcacctgaaagaggtcgaggagagcggtgaacctcttgtctggacgccggagctggcgggtcccagcaagcgtggaatcatccttaccggcggtgaaggtgtaagtctacctctcgacgccacttcacggcttgattgctcagacgtcgtttccttgtcggctgtagtccacgatccctcggctgcatatcttgctcaagatgctccgaaagacgctcggatgcacgttgccgatcgagatttaccactttcccgatgagatggaggatgaggccatcagaaacgatctgatcgcgtggggcgacgtcaaggtcgtcgaggtatgttttgacaacagttcgagaccgaattcgagtcgtgatggagcctgatatcttcctctgtagctcggaaccaagaccttcaacggagagaagaattggcgtatgtcgcagaggcacactgtgttcatcctcgtgggcgctgatctccagtcgcatgacagacatcaagaacgctgcctttatccaatccgaatttaccgaattcgtctacatggatagtgtaagttctggtcggcctggcactccacggtggcaaggtgtcttaccaaggccatctcgaatataggacaacatcccacttatagatcctgctgagcactttgaatcggtcgagtacaaggagaaccgatcggtcttttggcccgatctcaacaaggatcatcgtgagctctcttccggcgtgatcgtagattgcgatttctctgacagcagatcgatcgaaatgcagcggacaatgcgatctggcgtatcctaggtcgaccctgctcggatgagcattggcccgcggaagctggtatgtcgatgcaggccgacgtgcgaaagggatttgtttcataatatggcttcaaccttgttcgaacaggtcaggtcgtctacgataagcgaggcaacaacggcttgaacctggccgtcttgcatttggcgtaccacatgatgaccacgcctgatctgtacggattcctgggttatggagacaaggacacctttgtgaggctgcggactgtgacaatctcgcttatcgcgatgacgctgacttggattcgctcattcacgcagagatggagcttctacgccctcggcctaccttatcagcaagctcctaggcagtttgctagtaccggagggttccagcgacaaggcggtgaacctgaccctagttatttctgcgggcacagcagtaagtcgccgctgacgccgcgctcgcattcgctcgcgatcctcgtctgacccactcttcgcagtgcttcactggggtctgactccgcaaaacaagcgaaacgatccgtcataccatccgccacccgctttcttgcacactatcctctctaaacatcgcaaaaacctcgacccggccaaattgtggtctcacgttcgaaagcctcgtctggatggcatctcggaacctacgctcacgcgtacgctctacgagtttacgggagactgttttgccatcacgctcaaggggccggacggcctgccgaacagcaccaactcgatgagggattatcaaggtgtcttgacggaaccgctttcgacggtcttcggtcccggtggggagaagagcgatatctacctggctctgatggacattgcgccgacgtttgtcgcgatcgcataggctcgggaaacgttgtcctttcgatttctactatgagaggatcattttcctgttaactctagggtttagtgggactagactgcgggggtgtcaccaatgtcatacagatttgcaagtcgatcgtcaccctcgagggtttgagaccctgaccctatcgtgatacggaacgactttcggaatcaattccaaagagtgtctcgctattgaagcaaaattctccccgcggtcagtgggattcacaggcaccgcagtgactgaagaggtcgagcagaaccaccagagagtcttgaaccctttgactacggaagctaaaaaagaccgggagaggtggttagagccaagagcgaggaggggggatgtagccctcggggtaaacggaagcaggagcatacctgggggaattgagatcaggtgggcggagcgcgagtgagcgagaccgacccgatcgactcggcatgattttgttcttttgtgtggcaaagcgggagagcgcgcgcagaacagaagacagctagcagccagagcgacaggaggtggtaccacggaggaggcatattcgatcggaagcttctttcgccatttgaatcttgaaggcgaacatctagctcgtagtctatccttcttcttcaacattaaccccccttgacaatctaacgctctgcgtcgggcatcaaaccagtttccggaatcgacaaagatcagagatctgatagtgtaccctgccttgatcttgcgaccctgcttgagcgtgatagatctcgagggatagttctgaaggtgaatccgcattcatctgatcaagatctcgtcctctacgaagatagcaaagcgaaccgatagcaactcttggtcgaccacgaattgcacaggaggacgatttcgcaggataccccagacgtgcggaagaaacagggagatctcgacagtgggcaatcagccgaagccgaggactgcagcttgatcaagaaatggtgatccgcagtgcgaggggaacgagtcggctcgttttctggctcgtgataagcacgaccatcgtcttcatcttcttctcgtcgacaataccagtggtgagtctgcacttcatgctacaagactgatgagctcaaggggcatgcggactgatgtgaattccgctttgtctctgcgtgatcgcaggaggacgatggtcccaacatcttggccgattcatcagtaaagtctcctgcatggcatcgtccgttccggatagcgagtctcggtctggggcggaagaagtcgaaaaggaagagaatcctggtgacaggagggtcaggagttatcggtacgtagctcgccgacgatatccgctcgacaagcctgatctggaagggcttgactgacacgcttccttcaccatcatccaggtctacccttggttaagcggctcgttcacgagggtctcgatgtatccatcctcgatctacgacacccttctccagccgatctcgattacattcgaaacgcctcgaccccttctttcgacatttcatctttcgtccaagtaccgtccggaccagcgcagacactcggcaaactctcgatcatcacggccgatgtgcggcatacgaaaaagatcgtcaacgtcttcaagagagagacggctggattcgagggcatcatccatcttgcaggagtggctaggaatacgtggtgtaccgagcgagaggaagattgccacaagctcaatgtcgaagggacgggattgatctaccaatcagcgatcgacgcgacacctccaggcgtacaaccaccttggttcatctacgcttcgtccctggacgtatatggctatcacggagagctaggagcaggcaagatgaacgcgttgggtcgtaccaaatgggcagccgagagggctttagaagatgcccacgagcgttcagtcggccagggcaaggcatcccccacggtcgtcctccggctcggaacgacgttcggatcgccgatcgagttcaaagaccggttactacccgccatcatcgaacgggccatgatggagatgccgctccagatcatggacggggacgaggtgatcgatctcatgcggatcgaggacgcgctcgaggcgtttatggggaccatcaaattgttacaggaaaagcgagcgcggtacgaactcggccccacagaggaagaggaagatggcttgccggggaacgagacggtttcgcccaagaacgaaggttacggtcgccgacagctgggattctcggccggcgggttctgggacgaattcgacgtcattaccggttcgaccttgacccctcgagaactcctcaatgtggtcatggccgctacgcgatcgtcgtccccgatacaagactttagcggatcgaggcaaaagaagaaacccgggccataccgccgaaagacacctgcagtcaaccctcgcctcgagatggatctcgggttcaaacctcgaattcctttcgaaatcggactggctgcatatatccacgaacaacaggccaagtttgtcgattggtcatcccagtatcttcgcgaaaagtgtccgggcagcaagtacggcgatccgaccgtcgttactgaagccgaccgtcgaaatgaaaagctcgaccggctgatgggctgtaccatcaatatgggtgtcaatcacaacggctgggtgcaccacatgaaatgtggcgagaaggacggagtcagctgccaggcagacaatgtcaaacgcgatgcgtataattggaaccaaaccgtgttcaacatcgttccgccttcgctcgagaacatttcgccattggccaatgatcttttggacaagcgacggacccattcacgagataccggacggggtccacttgcggtacagtttgaagaggagaacaccaagatgttgctcggattcgaacgtggcaaaggaggagctacagactctagtcagaagatcgatttcaagctatacacgaaagaggatgctcgacggtcgcagatcgttaccgagtttgaaccgagagtcagtacagatctctagctttcctctcgccaagccgaatcctgatcggatcccgcgcacaggtccaggccaacgcttcctacctccagctcgttgttgctgggacgaacgaattcgtcgatattgtaccgcaggccaaggcgacacatttcgaactggccaagcttgcagaatcttcgcctcatgatgttcgcatgaccctcctctgctgtccaacggcggaagcgtggcctttacttctggacgatcgtgagtttcgcagtggactcaagagccgggtatcttttggctcacgatacggactacagacgagactgccgatatcaagtatggccacactggggatataccttacaacgcatcgcttcgtatgcacgagtgccaaagggtagaggaagcgttggaattcgcgcatggcaaaaagaagagccagggtgctgccgataccgacattgtcatgcacgaagagtttaccgtcgatctcgcacgaaagaacaattcggtgctcactacctacaagcccgccaactggaaagatcgcgattatcctgtctgcatgaatgattgttcgagcccgactacttgtgtcaacaatgggctctgccgatgtattcaggcggactactgcaaggtggaagcgcggaaccctatcgctcctgttgccgtatcggctcacagccaattgatcaagattactacaaacgacgatttcgccaaagctgtcagcaaaatatcttggaacgatctcttgctgccggaggctaaacgcgtgcttgacgaattccccaacttcatcaaggtccacgtcgtatctggctacgagggcgaagaaaaaattgaatcgctcgaatgccacaagctcggcgacaatcactgtttctctgcggacagcatcatgtaccgagcaatgcgcaaaatctccgtccctgccgatgaggcggatctcgtgattttaccagcataccagcaatgcaagggcgggtccttcctcttacataccatctaccatcatgcagacaagaccatcccagacttccacgctagagccaagacagtcgtgctcacacatgactggggcatctgcatcaactttgcctggaatatctgggcgggcaaggaggataatcgccttcatcccgattacatcttggacaacaccatcgtctggtccgttcaaggcgattccaatacgaaatgctaccgtccccaccaagacgtagtcattccggcgaggacatgcaacagcgtcaagctcaaggagacattcggcaatgtcttgcaggtgaacccggtgtcacagcggaccaccttgataacctggtcaggtgagcaccgtgggcaagcttctctgaatcatggcaatagtttactaactgacagctgtatttcaggtacatactggggaaccggcaagaacacccggttgcgcttggcttgcgaacgtggaggagctgccaagaaagaattggtgcccaacgctgggcctcaatctgtgttcctaaactggggttacatggagcaattaagtgcctctcgcttctgtcctcaaccaacaggtattgcaggtgagcaagggtctcgccttaatgcatcccttttgcacatgctgacgacattgcccttcgatcaggttggagcttccgtgtacaagacgcgatctatgcgggatgcatcccggtattcctcgctgatggaacgcattatcctttcgcagatgtgctcgactggtcgaagttcagtgtgcgactcagccccactgatctggaccacgtcgaagacatcttgcgagagataccgctcgacgaagtggaagagatgcaagccaatctgattgccatccgagaagctttcctttattcgcccgacgagtcgcccgaagacgaactggatcgtcgaggccctttgttcttcgctctgcattctgcgcggattcgattagtcacccaatatcccccttcggacaacatcacttcgacgttttgatgggttttaggttaggcttagctaggtttctcacaggttgtatcccgttttttcatgggtggcatgtatctataatgacgataggcttaaggactcggccaggcaactggtcacgtcaggttccgtagggggacgtcaccgtccagcaccacatcggcgttgaaagccgactggaatgctgacttcgcttcggctcgttaccgagtccgccatgacgaagagggtcttgagcagacccggtactccacgccacttctctctctggcaaaggctgagtcgcggcgacgtcaggggcatcgaaaagttcgagcaaagagctgtccactttatcatctgtattgcaggggaccgaacaaagaatggcaagcagtcggttggtcctgaaacggttgtagccgatttttcaagcagtctgtcgcgagagctcaaaacagagggagactggtattaattatactctaagactgaagttatacactgaggtgaggctttgaacgtcctggtagcgtcatatcatagcttgccgaaatcctcttccattcgcttcatgagctgttcgacctcttccgccgtggcgactcttggttttggtgcaggtgcagctggggctgtggttagcaaacacgagtcagtttccctagccagcgaggaggggcgcacagccagctcaccttcttccgatgtgttgcccttgtcttcgacgttctgatcctccgacttgcgtgcttcgggtaatgtgccaccctccaggagaaccatggtacgcttgacggcctctcgctctttccgaacctcatcgagctcttccttgagctcaccaagttcccgcttgatctcctccatggttgccgaatgtttcttccgttcctcggccaccatcttgttggcctcttcgaacagcgcttgggataaggattcgagctccgattcgagatcggatttcgcctttttcagcgtgtcgagctcgcccgtcaacgccttcagcgtggtttgggactgcgcgagagtcgctttgagcttttgcacctctgccaagctcggtccggattgcgcttcgagcatgctgccgatgggcttctgcatggcatgtgtcgatgtaggtgggctgtgcgcgaggaactctgatcttggagtcatgctcccaggagttggcatgccgatcggtagactgttcaagtcgggcatcttgagctggttcaacccgagttcacgcatgaagcccgcggcggctccattcttctcgaggttcttgcggaaaaagcctcccaagctcgaaccgaccgagccgagcgattctgagaacgtcagatcgcctgggaccgacccgggaccggtggtcaccgatctctccatgggcggtcgagcgtttgtcggtcgacgcggggtaggcatcgccgtcgtcttgagcgtattggcccgggtgagttggcttggcttaggaggaccttgacccgacacggatcgagcgcccgcctcgtctgtggcactgggggtgcctgatcccgccgtaccatcagagctcctgcgccgtgtcatctgcggacgagcgttcgggtcgaacccggcgggaatgacactcatgggtctgctcggcggctggaccttgacgcctggcgccgagctttccctctcgcgaccggtttcgctaccctgtcgactgggagctcgcgaattgaccctggagttgatcgggctgttgttaccactcgcgatggcacctgccagcgaacctcgcatcccaccgtatccgaaagccgaagccattgccgggttgtatcccacagcgatcgagtccatactgtgtctcacgggcgctgtcgagttgacgacgtccttcttgaaaccgacggtcgtctttggctggttggcgtttcgagcggcttccgacatggaggacgatgcgtactgtgcatgatggactaccggacccatcctgcccgcgaagccctctccgccccgcttaagagcttcttccaggagttcagagttcatctcggccagctgtagattggacatggtgatcttgagtttggtctcgaggtccgattgcagggtacggagagccaagttctgacgggactgcatgtccgaatcacgataatgtcagagatcagtatcgatcggcgaaacggccgttcagagggaacagtaaaccgatcaacctaccagatcttccgcatcgtgcaacacggctttcaatgcctttctcagcttgccaacatccgtcgtctcgtcctcgacttcctccaactcgttcttctttccttcgacacctgcatccgtctcgccagctccaccttgagtgctaagcaggctggtcgtgcccgtctcgagcaagaccctatatgcctcgtacttggcccgattatgctccgtggtcaagggggtagcggttccgctctgatgagccgtctggttgttcgacctgtaccgagtcccacctggggtggtcgtcccgtcctgtccggacccgtggccgaacgggttgttcgtggtcgtggacaagggggaagagacgatatcgtgggaaaccccgggagaggcatggttaggcgagatttggaggctctcttgaagcagtctgatatccttggaagataaaggcttgacggacgggtgcggggtggggcccggtcgtgaagcggatggggctgccaatgaggtggaagaggcccgtgccgatgatggagccgatagccccaacgcggcctgacgatcaccattactagtctgaagttctggaccggtgctggacgatgtcgaagcgatggtagaaaaggaagtccctcgagggtgatgattcctctcgtcctcgatggcgggtagcaaggtcgtctcgggagaaaacgttaccgtgtcgtcctctacccgactcgatcccgctgccggggaactcgacctcgaatcgtccttgatgatcttgataggtccgctagacgtccgagtcgatatggtcggtcggggcgattcgaccttgcggtacgatacgcctacactgggtacgcttgcacccaagttgaaagccgagctactcgtccgcgaatggggtctcgaggtcgatccgggagaaggttgacgagcgtgttcatccagcgacttttgctggggaggaaaagcgttctgcggggtccgtgtggattcgctattgttgcttgacctagacgtcgaacgtacggttgcatgaggcaactcgatggggagtgcgtaacccggaaacgacatggccgtgatacctgctgacaaggcggcgaggaatcagtctttgcccgataggctggcgatgatagaccgattatagacccttgcctgtatctcgaggtcgcaagagtggtctgagcgagatgttctcttactctcagggtaagcgatgtctatgaatgggtgtgagtgagtgaagtgatgttatcgagtccatgatgtcattttcttgttctcatgttcacgctaggcagctagccgtccggccggcccctcacgctaagctcaagactcggagaaatcggaaaaatgacgactcgggtgtcaatcgatggagcttcgtgcgactcccacaacaggccactcgaaatccatcacgctctggcatcttcgtacaaagccattgcaatagacgagaaggaaattctgaacgcaacgcacggggagagctcgagatgagtctcggggcaaagggaacggaaacaattgactttcaaacaagatacgcgtggaaggaagtcttaggtttcagtcaccttttagtagaagcggcagatacatctcgccaccatcagccatactgtatatcctgtcgtcaacgagccaaggctggacccgaatttttgagagatggtcgctctggcgcaacttcggcttctcacatggtcagcagcgctcattccgttcgaccgtcggcgctgccaaaagcacagctttcgaatacccccaaatacagcaacatcatgctggtactcattgaagacgaggagcgtgccaagttcatgctcgtttacaaatcctgatgggcaacgtgatgctcggccgtccgcttgtccgagcccgtcgtcggtccttccagcgccaaaggccaacagagggctggactggtggccttgaagtagtattcacatttctccggctcggagatgtgcagcagctcattgttcgtcccacaggacagatcgagcttgacactccgttcgggaccgttccagcatttcagactgcgggacgcgagatcagcggtcgaagccgggaaaaaaaaggtcacatggggtttgcgcgtaccccttgttgtacagttgcttcgagtagtactgctcggtaccagaagcgatgcccgggccagcgttccagttggcaaatgtactgcaagcgatagtttgttgatcagtgccagaagcgcattagggtcaacgctcctgcgatactcaccccaagttgtgcttcgcgccgtccttgttgcttttctgggtggcttgaccgaagaagcaaagcgaataggtatagctacaatcacccagtaatcagcgcgccagacagtgacatacgacacggtgacaagactcactctccctgctccttttcgatacaggtattttcgagctttttccattcgccttccgggccaaaatcgagcccgagtttttcgatagatcgttccgcaccggtcaagtcacgttcaaggttggacatctcggaagtcaggtcgttaaagttcttgcgcgcggcagccgtgtctgcgtgcgcagatgtggtcattagatgattatatcgagtcgcttgtgatctgtgtacgcacgggcggcttcgagtccactagcaacattggcggtattgctacccaccaatccaaacttgacgaggtaggtgataagcgcgtcgcgaacggcctcgtacgaatcatagagcgaatcggggacatattggtccaaccggtagactatcagggcgacaagcacgagtttagcgttgacgtcgtcgtgcaaattgtgataccacaaatgcaaacgggtcctatcgtgcactcacgcaggctgtcctcttcgtcagtctcagtgtcgtccgtcgactccccagacatgacaagaccgattaggtcgacgttctcgagttcgtcgagcttgtccatagagaactcgggctcagccgcagggacttcctcactcgtgtcatcgccagcttttgagatgtacttttctgtatatccgacaacggccgctttgaccgccatgtcctgcatcaagtaattagcaacaggccattcttgctcgataggcgccacagcctaactcatacctgatagttggggttatagccctcgtgcagcgctttgagcatgctcttcagctcctctttctcgctctccacaacctcaagttgttgtctcaaggacgacaacgctcggcgatgttccaagaaagagaggtagagcgcttgagcacgaacttcgtaagctaagggtcgcgtccagttggcagaatgctggggttttgagacatacgagaattctgtctcctttcgatttccgccttgtcggagctctccagtcgctccaaccggactgagagtggtagatcagactccagtttgagttcggctgcttatgacggagtgctgtccacttcaggtgggactgacctcgagcaccctcgacttgatcctttttagcctcgacctgcttagtcaactcggccacccgattctgaagtctagtacgctcgttcttggcgtatgcgatgtacgtcgagcggatcttggctccctacaaacagtcaggcggaaccatccgtcagctcgcaatgcgcagataccatacaagagcctttacacacggtcttcctgatcttattttccgcctccaaagtatcccggtatttcctgccggtctcttcgcacgtattggggcacttgactccagaggaagaagagttctcgtcagagccatcgcagcattccgaatctaaggcaggacgattgaaggatgcgaccggtcgtgaaaggtattaacataccagccttatgtgacaacggcgtgtcgactcaccacatatcccatctcccactctggagctccagatccaagcagagatgtgtcccgcgttcttgcaccagaacttcctccctttcatatagctgcaagctgacgtgccgggttcatccgatccatccggacagtcgcaaaagtcgtcgttgaccgaacggaacggtacgagagtcttgttctcatccagacattggaattgaggttccgaatgacctgctacgtcaagaggcttgtatagcgtagcaactgcgatagcggcatgtcaggcggactttacgagcggtagggatttctgctttctacttacgagcaggatcgacgcccaagacctcggctccggtctttgactttgcagaatgagcctttatgtttatgccctgttctgccgtcacgccgatgctacagcttaataccacagccgccgccaggattgattgccgcatagtacttctggcaaggagtgttcaacccttcaataacagctagaatcgacgctaagattccgaaggcgaaggcgtgctatgttcctttttgcaaccctctggacaaagacccctcaatggtagaccttgacagtattttatggccacagaatggtcgtattgtgtgtatgtatacggtgaggttccgttgaaaggtaggaatgacctagggaaagggtgctctctagatctagctaccgagtcgctcgctcgctcgatccacgtcatgagctgctcatgagggaccgagctcgacctccctcaacttttttggtaaaactgtcattctcaccaattctcactgcatagacgctcctctttcgcctaagcacaagacacactgctctcgaacctattaacaaaatgaccgacgctactatcaagggactgccacccccacccaagacctacgacggttcgagtcaccgcgtgctcatcgtccatgcccggtggaacgcaaccgttatcgactctcttgtcagcgggaccgtcaacaagctcaaagagcagggagtcaaggaggagaacatcgtcatcaagagcgtcccgggaagctatgagctgccgttcgcaacgaagcagtacgtcgagtttacgaagaggagagggtgcgcgaatctagctgaataacgttatcgtcaatatagattgatcgccggagcgcaggtacagtccgccaactcggcaccatcgctattgaatgcttccactaccaacctcgtcaaccttttgagcaacgaagccgtctctgggggaccttccacgatttcggcgccgacgtctggagcctcgaccggtcctttcactgctgctatcgccatcggttgcttgatcaaggggtcgacgatgcactttgagtacatctgtgacgctgtgactcacggactcatgaagattcagctggagacgggaactcctgtcattttcggtgttctgaccgctttgaccgacgaccaggctctcgagagggcgggtctcggacgaggtgccaacgggaaaggccacagtgagtcgtaccgttgacagcagtgttttctcctgctagtgaaacttacagcctgctgcgtcctctaccctgtagaccatggagaggactggggtcttgcggctgttgagcttggagctcaggctatcgaatggtcgaaaggcaacatctagattaagtcacttccagctcggaaggcccaactcactggtgcttgtaacgtaacaagaacgatccatgaaagatgcaaatccgtacgataccgaacatacgaggagggcatcctgatgcttccacagagatggctcggctggctggatcaagttacgacttcgtatgtcttgctctgcacgcgacgaaaggtgctgttgatctcttgtctgtctcttccgcattcggcggtgtagcgtattcgcatcaagataacgcagtcctacttcatctgccgcactgccggaattggcgttgccgcttccccagaccggtaaaccagcttcgcctgagatcgacttgatggtctgatctgggccggtgacctccatcacggtatcagccagcagtcaagcaatcgagagtgagtactcagcttgaccttctgcatatcagtaagagcctaccaaatgccttccgttgtcctcccctgtgtaaaaaggtatcaccagctcggaagtacgactaggttgaacgaagaatctcgcaaaagagccgcctcgtccagtgaaaattcaacctgtggaccggcctgggaatcgattctcattggccttcaggatagcgaaccatggcaatgagccgaccgtatcaatgaagacgacgtggacgacctacggaatgctgccttcgtgcatcggtgctgctaagcctgcggacgtccgagattttggaaactgcccctctgctgagcattctgtcgattcgcgatgagacagcttcgggaacagccaacaaggtcgaggcaacaatcgggatgatggaatgtaccgcaagcgacacctccacgcttcaccggccccgtccaccttgtgaaccatactcgaacgtccgcaacaggttcccgccgagaaggaaagcagaggtatcgctgtagtaggaggaaggcatgcataacatatcgcatggtgtgttgtcgattacaatcaagccgtgggatgagcgagaggagtaggaggagcaggagagaaacagaagtgatggaggcggaaagcggaatgatacgatagcgagtcggggaagagaggaggagagactggcgaacatcgaagaagaaggtgaagcgacgatccgatcataataccgttcggtttgctttgcacaccagatgccacggaggtggatctttggggcatttcccgggagcctttactgagttttagttgcccgatatatggtgaacggtattgataccgctcccgggagccgtttggattttaatcatactcgaatcgccgggcttcaccccttcaatgatgtcgcctgggttgggggattgggtcttgactagcccgtgctcaagcgtcacctcggtccaatcgaggcccctcccccgagggataaataaggcggggctgctctcgcgccgacaaatatgttaccctcttttggcaagtatatcgcgcaacctccttgctcctatcgtcctcgctttcaaagggtgtttatgcccctgtttgttatggcccgaaggctccaatgccagaaaggccggacaaccatcacgacggtggttcgctccgggttatctgagttacgattaccccggcagctagggctcgcctactcaaggaggaggtcatttcttaaccacgacggggagctgggaaagttccggaatgtgtggtgttgggcccacgtcctttccaatcctcagctctgcccgtaccatcgtactcgagcggaggggttgtgatcaccgagatgcatcggaggtaggtagccacactcagcctccgagtcgggccagtcctcgttccgacggctctcgtttgagtgagaaagaccctccggtgccatggccaggacggatgatgaacaccctcgggtcttcgacccaccctgcatgcgaacatgaggatgagccgctcgatgcgagtaggatttgcttcgcttccattgctggagcttgtattcatctctgcgttgcccatatcgtattccacatagcccgaagatagccccgttctcgatacagtcttttggaagaggatgcacaagcaggagggggaatgaggggaaacgaacgaagactcagatgaggactgaccatacatttcttcaagtcttgacgataccctcttgtcgggtttttaagtataggagagtagaggcgggaatgctggatcgaggggatggagggggcaggtggcgaattatatatgccctcgactgcctgacagctaggggggatgcgggttgtggagccgtggagaggcgattcagaccaagcgcaatgaaagaaagaaagagaagagatggcgggtcataacaaagcggcataggagcaggagacggcttgttcgaagttctcgattcagtctcgtgactcgatttgcgcttttatgtggagccgtccctgggcgaaatgctgttgaccatggtccttccatggttgccctggcacggacgacatgcccgtgctgacaagatcgaggctgaactcgtggagctgacaagtttgaacgtcgggatcagtcggtcccgattgaaatcgtcacattgcgcaacggctacctcgtactcgagggtgcgaaaagcatattcgatacgcggctcgtttagaaggggcgattcgagccctgattgtcccgtctactatcttcgagtgatgagatcatgattggtgtaaaactcgatagaatcagccgaacctggctcagatccattgtagatggagagcgttcagatcccatgtaaccgatctgaatcttaattttggttcattcggaaccctctccttttcccgcgtcttgtttgatgatgagcgaaatgaactgatggcgaaacacgcgcgcttaggcccccgtcgctcgtcacgcgccctccccattctgccgtctctgtaggtctcccgccgagggtcgtacctctctgctcggcttgaaacgcagatccctctttactgatttgtttgttgtggtgcaacggtgcttctaggctaacttgcccgatcgggtaacttggcgcttgtcgatctacttctctgctctacgcccttctccctctgctcttcgtgcccctggtgccatttgcctggggggtctctcattggtcgccaccgtcgtggtggtcgtggactggtctgccacactgcgctctggatcgatatcaagttaacatcgacttcttcttcaatctggtctacgttcaaatcgtctcggcttcaagcatgtcatcatctcgtcttcatcttcacagttagcgtcaccctccggtctataatatcgacaccaaagacctgtgagtaattgactgcatcggcttcattcccagtttggctcttgatattaggctgacgataacgccgtctctgccagacatataatcaatcctaccttgtcaatacccccttcatatctacttcaagagaatgtcacgcaaaagcgctgcccccgccatcggtacccgccctgcgattgctactcgccctgccaacattcgtgcggctacaactcgtcttcctgtgaagtaagttgtcgcaatgctcggctcagttgacaatgaaaataagctcatgtcatcgaaccacagaccttttgatgccatcgagatcgcggccgccgtccctgctcccctccccccagccagagaatggacagatgtagaagccactgcgctctaccaagtcctcgtcgatgagggtctcgaggtggacgcttacgtgaaggttctctctcgacgactcgcttcggggatgtgtcccggacaggacgtagagggtgcgacgttccgtatggcgtacggcacacaggcgttcgtcgctttggagcggatctgccatcagggatcaggcccagggaccgttgcacctctccaccgcaaggacaaggaggttctgcgtgcaaaccccggctttgaggagtgggtcaatgccatgcgtgctgccatcgtcttcttcaaaaagaacaggaagaagatcgtggaagaaattgcggccttgagcgctctcggtcaaggtctgccccgagccatcccccccaagcccatctcccttgatctagtcaagagtgtatgtggacttctagcgtccaacctagacatgagagatccggtgcaggtgtgtttaattctgcctttcctactcgagctgacgaaacttgagctgaccatccttgagctgaccatcttttgtcaacgtcaacataggctgatttcgtcgagttggtgactcgaacggcccgcatgaggtgcacagagacaccttatgctgttcgtattagcgacgctggtcgcgtcgctaatatgaacgaggggttcttagagtcactgaccactcgaaggggtgcagagcctccgtttcgacgttacgagacggcagagaacggtgaagagcctcgatcgtcggaacgaatcaagcggagggatcgggacgaggacgactcgcgcccagcgcgtaggcaacgcgaattctttgattctcttcgaatttgatatctctttcgaacccacgctctttgtctgcgaacgctcgttatacttttaacgctcattatatcatcatacactcgttcatctagaaatccattcgtgaaaggttcctagcagccgccaggcgaaccgcttccagcgcactgagagcgttcgaccactgtgcatcatgttcagcgggtccagaagccgaacctgcgagatcccgcttcgtctggctgcccttctcgacgaccgaattgcgggactgaatctccgccaggctccataggtatgtcgatggcgagagagctccgcctcgcagcactatttctagattccgcagcaattcgcaagtatcgttttcgtcaagcagcgcgtcgtcatctgttttgtctatcatgagctgagcttaatcaacaagatgagtcattgtggaacttaccttccaagaacgtcaagctatccatcagcagcaccgccatgaaaccttccggcaccagaccttccccgaagcatgcgattaagatcttggcagcatcgcgcttccgaccgtccgcaaggctatcgagaaaatccttgaatctcgccaggaaaggaagcacggtgctgaggacagacaagcactatcagcaggcagtatcgactgggatccttcttccagacttcgacatactgttctccatcgctagccgaaaagatcgagagcggtatagcttgtacagcctgaagataagcttcagtccctgcagaatgtaggtctggtcgtcagcgtcagttcgtcgatggaaacctgaatgacgactcaccttgctcgcaatatacattcagcacggcctctccaatcaccgccaacagtcgcgtgtccatcgaatgtacgcagtatgcaacagactgaccataccggccaagctcaagcaaccggagagctgccagctgaacccgacagatttggcgtcagtcctgccaacgaacatgctcacatctcgaccggtggactcactctgcagatctcgcgacgctcgtcttctaggccgtgatcggaagccacccgcaacagcgcgttgaccgtttcgagctcggacattgactgttcgtcccgctgggaaggctcggccgtttcaccgacatccatgattgaatcccggtcaaccgcattgctctccggtacgattagccttgtaccaaggtcgagtgagactcttctcaggacttctcgaatcctgccgacgccttgtgctccacatccactcaggtaatcgcaagcgatctcccaatagccctcatgaccgagtagaagcatgtccgtgtactggatcacaaagtaatctcgaagagggagctcataggtctcgtcgtcatcatcgtcgacgaggttgagtttctcgagcaagtcggttagatgggtagccagccataaggacatcttgttgcattgcaccagtgcctgttcgcaatgcgtaggtgagatgaaatctttagatctgacagcagacgatactcacgtccgtgatttcattgttacatagagcaagcatcgtcgtgtcctgagcgctattcgggtctgcaggtaaagcttccgtgatgatctccagggcagttctgacgggcaagcgaagtaaaggtaagtgagaaaaatcgctggtaggaaaagctatcgatgacttgcctcattcctccttctatccatccttcatccgtgaagcgatctcttcgaagactgacgtcgacccacacgccccacaccccaagtgccaaagtccaatctccagctccttcgttttcaatcgtatcgagcgtaatatcccgatcgccccataggagaccagcaaacttcatgagcactcgttcccagtgctcgctctcttcttccagaacagccgggtcaatgccgttggtgtcattctccagttcgagccatccgccgcgatcttcccgaccttggcaaaagatggacacttcggctctgatctcatcgcgccatgccgcgtgagccgagcggaaagctgcggttgtcggataattgtcgatgtctttggaacggggaagtttggcaaggaagtcggcaagaattctagcgaatgaagcgatctgaggttcgggatgcgagtccgacaaggactgaagtagccgctgtgccacttcgggaccacgcaagatggaactatgggcgcagtgagataagtacccgtgacccggtcaccgataccatcaggttcaaatcgctcacagacagacggtgctttcccaatcatcctcttcccactccttgatcctgttaccaagccggtttgccgagtcacagatagatccccaaccatcaccatctccgtaagagttcagccagtcgagaagttcttcaccgacgagtgagtcgcctagtccgtcctgggggaagaatagcagagtcgcaagcgaaaggatgcacagtagtgagaggtgatgggcgcggatcgagggctagaaggaacgttacccagttcagcactgacatcctggccgattacctcacgcagacctgcccataataggaaagggcgttctgctcacctcgagttgcgtatccctgacgacctcttccaccgcttccatgtaattctctgctagctcccgcatgtacccgacccgtttgatttcctggtcctgctccgacatacccgttgatgaaggcccggctactgaagatagatttccagacatgagcggcacgacatgaacttgatggatggcttgagccgagttgaatatggtaaaggtatccttgtagaactgatgggcagggcgagagtcgatcagcgacttggctaactctgcgcaacttcgacaagctactcacggcatgaagagaatcttccgtacttccccaagcacccatgtagatcgccttgtcaggctcgaacgtatccttgacccttgtgaccggctcctcccgcacgatcccattctcatcttcccaagctctcgcggtcgtgtcggcctttggtgcaacccaggccgtgaacgaactgctcgacggtgacaacgcggcaaggagtgtacgtcccgaagaagaccatgttgcttgtccaccagggggaataggtgaggggaaaagatggatgaccggtaggtcaccagacgccggtgcagagtcgtcgaacatgtccgttcgcgagctcgttctcctggtgagcggtctgggtcgtttcgagcggtaccgagagtgttctataatttctaccttgctagatcccacacttaaagtctttgatagctacagatggtcgatgtcgagtgaagccgacgaaatgatgtatgatcttgcgtgaaattccctcggcttctcacactcgcaaacatgggtgacccaactttcgatggatcgcgactaatgacttagcgagaatcaactctaccaacgcgacgtgaacaaaaccacgtcctggtcatcagctatgaacgattggagttaccgattgtgcacagatatataggacggatgggttatcgaatcgagacatggcctatcgatctttcctatcgcagctacactgcatttgcaactatcgagcccatgacgccatttcgcgtcgttcacgttctgccttaggggtccgtcggctgaccgtcctctcccggtccatctgtcagccaagcagcaaagttgtccaatcgctttcgctcttctgcatcggcctcatcggggtcgaggaagtcgtccccagcgccgctttgtcggaatcgttccttgccggtgtagatggtggcttcaagctgcgagcacgaatgagacgatcagttacggtttcggccccacataaacagcctcctgcgagcaaggcttacctgctgtccgccaaagaatcttccattcattttctaccgacaatcaaaggtagagagtcctgtcagttccaatttctgtcgcttcggaatcacaagacgaccgtggcttaccagtatacaagcctgagccgaaatagcatccctaaacttgatcgtaatgacgccatcttcctctttctgttcatctcgcatttgtgaaactagatcagcaatccgcttgtgcaccagattctggtggatctcccgcgactcacatcatacagcgtcacattcgttacggtcccgatactctccgcttcgtcccgaatgtcctccttcaactcgatggccgccccgggatcggcttccagctcttccagcgtgaaagcgtgtttgagtacgaccactcgggcgtatctcgagttgccggcaggaggagctcctggattgggtgcgagcggatcttcttcgtcggcggatgaccagtcttccaatttgctagagtggcgaattcacacaagagtcgagggtcaggtcagtatgccatcaacatgtcacacggcgttcgatcggcgatcggctcacctctgcaatcctctgatacgcttcgccgctcgcctctgctcctcgctcaaagccttgggagccttcttcttgccctttgcgctctgctgcccgacacccactccgacgtccttgacctctttcccctctgatgcagcctcggcctgcttttccttgaccttggcttcctcccgactcggccgtttgaattcggcctgcgcgaccttgatgttcccctcgccggaaccgaggacgagctcggtatcgtcaaacaaggtacaggcgaggtcgaccgagttttgcttgaaatacgagacgagggcgtctcccttgaagtttccctgtgcgtcggtgtagagcttgactttcggattgccctcgtcatcggtcatgagtagtcccgctcggctgaacgtcgaggccaagagctcggccgtcgtgcctggagggaggttggtaacgtagacgtcggtgatcggacgaggcgccttgggtggtttggcataagtcttggagctcgaagccagggcgaggtcagagtcgagagggggcggtaaaccggtcccggcggacgggatagggtcgtttgacgtgtagtcgatttcggcttgctttcgctttcgctggttcaggatgtgttgtttgggtgcgacgggggcctggacagagacagctcagaatacgataagcttgagtgcgagaaattcagacataagaaacaggaaatacctcttcgtcgacaccctgcacggcatacgcagcttgttgcgctttaagcagctcgtccgtaacctgtacccaagacgatggcagcaaatattgatatttagcctgatcgccgaacagcgcgtttacccagacggacttacgatagggatccacacctgagcagcttctgcccattcgaactcggcgccattctcatcctcgtattgccatttcgagacgttgcgatcgtagtgtaccctgggatccgagtggaattgatcaggctttggcgcgttgggtggagactggatcgcgggagcttgcgatacgccgagaggatttgttcgaggagccgacattgtgcagattgatatacccttcaagaatttggttgagctcgcgttgcttgtagagaaccctggctgacgtcgatcagaatgaccttgattgcccgctttcgaccgtgacgacatcatgatcatctcgtgaagaagtttgaaaccgataatgaatattcaattcaacattatcattccaatttctaacagcttcggccatcatcatcgcgcatcggttaagagcgaagctattatacgtcgggctagttcgagtcgagacggtcatgtcatttgtcacgcatctagtcgtttgatgccatgtacattccgtactagaggcgtattgtcatatcgaagaacacgaagaacacgggaataacattataggttcagaacaagaagctatactccagtcgcggcatttcgacgtcaaactcgttcacacgtgtgtactgaagccagggttgacaaaggaggtacatctttccgattcgtaggctgcaagatcggacgacgttacaagtatcggtgagatgctgtgtagcggtatcacttatgaccctaaacagacggctgacttgaccggcgatacgcaatcatgtctttcaagcagaatcatcaacaaatcagacacagattggcgcaggaacccgaccatacattcgagtcgaacgaaaggcaggtacgactgggtcgccttttcactatcaattctacgaatatcagtctgatttcatgacatttagatgggagaagagaggaccagacggtaccaggatagcaagcgacttgcccggaaactcggcccgcgacccagccgctcgttctgggtcggtctgaccgtggcagtcttcatctccgcgctctaccttctatcgacacccggctctttcgaacgtctccgctcgttatcgcacacgttctcttcccgccccggatgtctctcagagggccccgcgggacttgctctacagcttcagatcccctggtcgtcccgtcaacgtagcatcctcgggcatcaaggtccttacacacctccctttctcaactttactttacctccagtacgatatgctgagcctgggcaggaagagggagaagtactcgctgccgtgatcatcgtcagtcctcgtcgattcaatcaaagtaagcttcacggggggaggctgactcgcgaatcacgctcgatctttcgtagctgcaacgacatgccgctcgatatcctaccgcctcagtcttgaggaagatctcccgcgccctcgacaagatcgaaagacttccccttaccgcgttcgggcccgattcacctggcctggatgcgtacaagaccgtcgtcaaaggttgggcagccaaggcagggacattgacagatggaggtcgtcgaatgtgagcctgcctgtgatgtctacgtgaattacgtttcatactgaaacgccagttgcatggcggatagcgcgtaccaactcggtaggctgtatcgtgctcggtatgcgggtctcgtcgacgatgatccggagaaggcgatctatgtacgatctcgcgggaatcaccgctgcatagagtctgcggggtacctgctcgaggtcagtttgcgctttccgaagagtcgcaagtcacgtgtatgctggtcaactaatcgtgaccgtatgttttaacgattgtagggttacgcaaatcagacgtttgagctgaagcacggaagccgtctgcctcggccagatcatgtgtttccggctgacaacgtgggttgcactcgatcgcgcgttattcttacccttctcatcttcacgctgatgccctgcactaggtcgattggaggagaaatccacttggcggtacagcggatctcggaggagagtgagcagacccggtggtttcctcagtagcttggtgttcaattaacttctacacgactgtccgttccagatactaccgtcactcggagataggagagaaaaaggcagaggggtacctcgatacatggacgccgaccgttctcccccacctacgacgagcgctgggcgaggtaacggggcgtcctctagaaggtgtcgacgccctcgctctaatgagcttgtgcggattcgagacacaaatgtcgatgtatcgagaaaaagatccggcactgccctggagcccgtggtgcgatctgttcgaatcgctcgggccggataaagagctggaattatgggccgcttatgcatattggtacgcaactcgagtttgcctcaaatgggctgcatcgcatagctccagattatcgatcgaaccactactgaagacatctccgttgcgctcactcaggtacgatttcaggaagtattacactaagggtccgggcaacgcagcgggcgcggaagcgggggtaagccgaaatcaagcttcaattcgctatggccagctgatatagaaacactgtacctccgaatcaaagcgggtgtgggtggacgatctgaaagaacgcttggatggtcttgaccgtaaatggacagacaagtacgcgcagagtagcttcaaggctaagaaaggaaggacgtcgccgagacttctcatcgtcagtgctacaatggcggtcagagtaattcgaggctgattgttctctggtacaggactcgtcatctgacaaccgcatcttgctcacgttgaatgctctcggactcacctacgtgagtcgtatgcaatcggaaaaagggacagggctaacgaattatctggctctacccagcgtcttgcagaatatagacagagccggctgactccgtttgcgaccgctctcatcgtcgaggtctatacttccaccgcaggaaacccacgacttgtctacagaatctgacacaaagcgcatggtccaactaatattgacttggtctgtaaggtggtgtatttcgatacgctctgcggcaacttttgccgggcctgcattgctttggcttttatcattatcacatggtatacgcggctgcgcgttctgattgtacatcgcccgaatcctattatacgatatcgtgtcattgaaatatggctcccttattacccgtgatagcgtcgtatcttcgttccgtgcgatcaagctgattgttgcctgtacatgtcggctagtctttgaacgcagtggaaccgggtcaaccgagccatgattaacgaacgatgtatataaaggaaagcacacgggtttctctcactgttctgctgaagtagcttcctcgattcccttgtcttctctgaccgagatgaatcgcggaaacctgagcgagactccccgttcggaacccaaaaagctggcgccagcagtgtagactatatcgacacgcggtatcccttcaatacagcgccacgatcaagcgctaggatccggctcacctggactgcttgtgatgtcggccgcagccatttgccatacctgtccgttcccgtaaatgtcctggtttcactgatggcaaacgcaaaaactcacctcctgagggttaaaccagatgtcaggcgtcaatccgccagtctcgcaatagctatatggtcctgtcttgcgcgacatttctggcttgcctgtcgggggatatttctcaaggagttctttgtagaagacatctgtaaaacctgcaaattgcggacggcgttcgatgaaacacagaattaagccttgtgcagtcgaccaatccgcacggaacacgcgactgacccgctagacacttgcaaaccgcttccaaagctccagtctccggattgtaggcggccaaaaggattggagaccaccagccggcttttcgacctaatccatgccatgcgccaatcgggacgaggtcaagcgtatcgccaaccccttccaggtagtcctttttcactttcaaccacccttggcttcgagcatcgggttcgtacgtagaaggcagaggctttttgcgacctccctttcctttcactttgcccttggtctcctcttgacaattatcctcgtcttccgcgtcgtcatcttctcccgtcaggccctctccactctccaagagcttgaccatgagtccctcgcacttttgcgaaacgacctgttcgaaaaaagcttgaacgtcttcgggctttgtcgagtcggtggattcgacatgaccgaatcgggcgatagtcgcatcggttttactgaagaacggttcgaacaaagtgcggagtaggtgtcgtcgaatggagaatggttgacctaagagtgactgcaatttcatagggctgaatcagtatatgacgctgatagcctcgaaattgtcagactcgcctcatcgttcaataacatcaagtcaaatgagaagacgccaacgataaccttgatatcctcgaccttgacatccttcttcgcacgatttgacaagtcctggaaagttctgaacgcgccggtatccttgtcgagcgcaacgacctcggcatcgatgatgaaggacgtgatctgtcgagttgcaagcagctcgagcatcgtagcgtccggcttagtcaggtgtgcggcttcagggaaaggcttcgttgttgctggtaatggtcgattaatgatcgcgctcattaaacccaaaatatccgggtactatgaacgagttgtcagcgaagataactgccgagcaatcgttcacaactacaagttgcaacgaaccttttccgtcatgtcctccaaatggctgattgttcgagataccgcttcttcagcggaacgtccgcagcgaggccgaggcatgacttaccgactgaaaagccttacccagaccttctgtccgccgtctgtagactgtatccatctgcctcctccgtcgtcggagccgctgggtccatcgatccgagcgtgaatttggactcgctgtccgtccaacttggcttcggcggtaaagggcagtgtgccaagacgagtgtagacttcattgagagatctcgtgatggagccaagcattggcgataaaggtattcctgattgattcgagtatcgactgagtccctaaagtgctaccggatggacaacttttgactcaccgaccgatatgggcactcgttcctctatattgtctaacccgccagcgagaagagccgcaagaatgtcgtcatagttcggatgacgaacactgttccagacttggcatcagctatccatccagtcgaggccgtacggttcgaagtgcctcggagtacttactacacccttctcaggacagcaacaccttccacgcacttttgctcgaggatctctcttgccgtgtcaggttcctccttggcttttccttttcctttggcaccgcccttgataggaattggtctgacttgatccagctcctctgctgtcgcatgcatcgcatccgagagatttcgatagcctctgggtcgacttaggacaaaggctctcgccaaagacgaaaggagcgtctataaatcatgttgtaggtttagctgtttagtatggcttgttgataatgactcccgtttggtatcctggctcaccaatcgtaccgccccgatacgtagatgtctaacgagtgtccgcacgaggtatctgacttcttccccttttgtctgaacaagtagcttcttgacaatgtcgcctttactcttggctgcgcctgaacctttgatgcttgcaatcttgagaagttgcgagtacaagacgtggacagataacggtgttggtgccatgagcgttcgcaaattcgactgaaacgcgaatagaagcgtcagctcgacctatagtagtataacccgcggtattgtacacacggagtcacggacttaccttggcctcaaaagctacatcgcctggatctccgtgcttatcccaaagtcgtttcagtacgtcacgcccgacaccgctgacctcttgagtagccttagtcaggacttggctcccgatgccaagctcgagtggaacgtatgacggtttcagatggtttgacaagaggtaaatcgtcggaagtagatccgctggggaatgatgaatcagcagtcggataaagctgaaatgggtgacctgatcagtctaagatatcaatcaaaaaagaaaagactcgggctggaccaacttggagattatcctaacaatagctaatcgactcctcgtacctcctacttggagatagaccccgactaggacttcgtaaggcagcctgcctcctggccattgcgtgatgtcgacatcttccggcctgaacaagaatgggtccgtatcgaaatccaatgtcggcgcggtgttattcgccgcagtagcagagatgacaggtaatgctctggatgaggatgcaccgccgaatatcgatgccatgggtttgatgtcccccggcgcttccgacttgatttctccggattgcaggacgtcgtgcgtgcgttgtcgtttcgagggggatggattgaggggtgcagtgagtttcaacatcttgctcggggttccagggtttgagccactcggagtcgataagggaggggtggaaggtcgggtcctcttcgttaccgaggcatgcttgctacccgtcgtaccggttgcagtaccgggaggcgaagatgcctttcgtttccgtccagttttcgattctccagcttcgatctcggaatcggaactctcgacctcgatgatgtcctggttaatctcgaccagtttaacgtttcccgattctgccgaggccgcaagagtgagctctggaggtccagcggagagaagcccgttcgtcgctagatcgctcagacgaggtcccgaaccttcggtaccctgggaggcgcgtgcttctgatccaacaggcccgatcacatactgtgggacctccagaatcccgctatcatcttcggaggaatcgtcgatcgagatcactccttgatcctgtccagatccgcgggacttggtagcattcgcctgactcttgccggatttggcgccgacagtcttcttgactgctttgcccttggtagcaccgacttccttctttggatgcccgtccgtctttgtcgtcgacgggcccttgaagaaagagctcaagctgagttgttggggtccatctgaccgttgcttcacgggtttggtcttgctctcagacgaggaggaagcggccttttccttcggcgccatacttgaatcggctatgctctcctgatcgaatgtgtgtcctcggtctctcggtgaggctatttataagagatcctctgcatgatgcagataaggaaggggtgctagactgcctgcgacggacatgtgtagcgttcagctttggtctgtataacgtagttcatccggaaacgcaattcctacccttgctaggtaacggatcgctggacctggcggttggtcctgctcgagttagaagactcagaagaccgcgcgatgcacaagatgttcgtgagattctgatcgggttcagtcgatagctggaatgtcaatctgagggaagtggtcgaagttataggttgttgtgcatgtaaacagggtgagtttgttgttaaagtcggttcaggtttcggcttgaaagctaaagcggatctcgatcgatcgagtttaccaaagcgccaaatacaagtcgaaattaccgcctctacctcgatcaacaagcgccctcagaagcgtctacataaagctcatcctggctttcctcagggccgcaagtctgatcgttcggatggttactaatgaccaagcaaaggcagacgaatgcgagtttcacagagatataatcagggccgttttcgttgacagagcgtatcgcgcaaaagtccgcgtcttggagatcgtgacgaatcagccgagcaaccctcgatactcgtctgcacgtctgcactcgatgatgatacacgtcagtgtggtgagccagatttaaacagtcctgggggtgaaatcatacagcagctcgctcgcctggaaacggccttgcaaacgtctcgaccggcttcaagctacaacaagcggaccgaaggcatcacaaacgagacagatcagctggaggcatcatggatcacggttcacacggcggtatggatcatggcggaatggatcactccatgcccatgaagtgctccgtgagttgggcaagggaaaaggttcatgtcagattcaacctgctgatgagcgaaaggaatgtgaacgttcccctcacggtcgatcgcagatgaacatgctatggaactcgcaagtagcaggaacctgtgtggtatttgaacgatggagcattcagacatggtggggcatggtcatctcctggtaagccgaggcagtcacgcccagagacttttgctagcccggcgactaacgcacattcactgatgcctcgcagcaccgccgtggcctttctttctttcctctacctacacctcctccacctcgcgcagcaacaagacaaacgcacggccattcaactctacctcggacagaagccggagacgccgttcttgagcagaggtcctgccacttccgcttctggggacagggaccacgatggacctcagagtatcagccgggcggagagtcctatgcccggtggaaggggcggcaacctgggagtgtaagccaaatctcgtcgggctcaagagtcaagagtctgcactcaggtctcacacggaactgtttaatttgccttttacaaagtcaaaagttgccttcctccgtgagactgttccgggcggtcttgtatgcgatcaccatggcactctcattcttcgtaagcccggtcttgaagcaaaggcatgttatattccaacctcgctactgactgcccattcgacgtcttgaacagttgatgctcgtagccatgacgtacaacgtgagtcagacatacacggaccgtgttgcaacgatgacgaacggctaagacgacggaaatcgccttgtttcatctcgacctgtagacctacctattcttctcgatcatcctgggtggtttcatcggacactggacgtatgagagcgagatggacgtcgggtgagtttcacgacgttccttcacgtccagtctggcttgtagcgctgaaccatctcgtttcctcccttcctttcatcagcgccgtcatgaatggacagcagagcaaaggctatgcttgtcactgaggaagcgtgaggctcgaaacatcgtctctactcctatacttccaaatttatctctgtaatcgctcgtcagcccgaatgtatatactcatgtaaccaaatcatctgatacccgaccggtgtcgaacggttcacgaagatccttatgccgctctataggagaagcttgataaccgacaggccgagttgaagtgatagagcgaccgtttatcagtgatgagtgttttctcttatgccttccctctctttgcaattcaagtctgatcggtgcatgtcctgtacaaaaatcatcttacggttcaggccaatccatgtgagtgccttcaactcctggggtgaacgatgtgaacaaagcagcatcatcatccatcaagatcgagcaaatcgtctcgtccatgctcgctttcgaatcctgtgcactggctcgcaaatcggcgacgacatcgtttgacgtgcgcttacccagcatctcgtgcaaaactgcctgcgaccgagacgtgcgcatcgaagccgtctctgcgaatctgtgactctggtcggacggtgtattatgtaatgtttcgaaacgtgtctactcgaccgaacgcccgggatcgctacaccgagaacgtctgcgattcctcgtgtctagagtcaaccgacgccatacaccctcccacgcccggacccttgtcatgtggcgagtgaaaacacaacagccttgcgttacggagcggtgatgagcggcgagacctgatgaacggccgatcacgggtcgtcatcatcgatcgagtctcatcgcctggccgctgggacggtcctctccctcatcccggcggcattggcgttgccggcgttgacccccgtagcggtccccgtgctcctgttggcgggggtgttgggcgtcgagacggcggacccccacatggagatgacgctcttggcctgtttgtagacgttgttgatggcgggggattgttgggaagcgaggtgatccagacggatgacgaggttgtcgatgaccttgcgctcaaaggtcgaggagaggtatcgaactcggagccactgggagacgatcagaggagtggtgaacgatcccctgaagctgtcgaggatgaacgagagatccgtatcagcatccccatcgaacgcacgcgagatcaatcacacgacccaacgtacgtgacagccctgaggatggtccagagaaggatcccgacctcggagtaggcgacaaagaacatcgcgcggtcatagttttgcttgataaagttgccgatcatcgtcccgtacttttcgacggtagggtgttgcacgggcttggtgcctgcagcaggtcgggtagcgggggtaggtctatgcgtcgagcaggaagcgaggcgtcagttcaggttgcaaggggttggagatttacagattccggggggtgatgaggaactcacgcggtgaacatcttaggaaggatggttcccctgaaaaacgtcagacagtggaagaacgaaaaagtcgcaaaaggcaagagcgagactatcggacaagccagtcagatcagacgtcagcgagtgaatcatgagcattcttcatgtacgccacgagcccgactcacggtagaggggtttggagaggaaccagtagacggccatgaagccgtactgcgcgttgtcctccatcatggccttttgcaggtaagccctgttcagctggggcatcccgagtgatttcgagacgacgatcgagtaggagacgagggctccagcataggcggctatgatgaggtcaaggagacggtgagaagggagacgacgggggaccttggggatgggggtcacgaccgtgaaactcacctttgtaccagaacccagggacggtcttggaaaagatcccaatggtataggcgtagaggatcctcactggatggtagaacgaagcgtaagacacgatgtaagtgggagagatgagatattggataggtagatggcagttcgagccagaacgcaacgtacccgcagacgtgaaagtgaccaagtggcccaatgcccagagatattgaaggtccatcatcttgacgaggagttgtcgagaatgtctatttgacgaaggtgaaccgaggagagcacttaagttattgttcttgtgcaagccagaaaatgaatggctaggttgtcgatgcgagtcttgaattcccttgttcaactcgacactaggttcgagccaactcacacgacgatgaaaggtcgatgtcacttcatccaatgcgtcatcatcacacgaagcgcttactcgccgcctggctcgggaaggagcgaggcaaggggagggcgacgcgtataacaaataatgatgacgacgtcatcatctttgccgcccaaagtcggcctggcctggcctgtcttgttcggtttcatcgtcgcatccacatcatacagaccgctcatctcggctcagcgaaaggtggagaacgattgtggagaacacgacacatgcatatccccatcgtatggcacaaagtttacgactacaagcacacaacaaaatctttcccttgactaccgagaccgtttgcgacgcgcgccatccccccaaaaaagggaagaaataccgagaatggaaactggacgacggctagtataaacctcgtatcgaaaaacaccccaggtccagcccgagttcgaacgaggtttgtcgtgaggcgatcgagggcttgttccgcaagcacgtatacatcgctccaatacagtgatagagttggggggtggggaaggtggtgggggcgagttacgcgagttcgatgtcgaggtcctgatcccaccggggtacattctatggtggcggggtgtctggttcgagtcgtcctcgggggatgaaatgggcggacggggaagggcagtcgagattgagatgagagagaggtccggtccgaaggttgggggggatgttgtatagcggagagcgaattgtgcctgcttatacctcggacgtcgagttgaagtacttgacgtaggcgacttcccagtaggcgttctggaacttgtctccggagttcctgacgtaatcttcgcagctcgagtaaccggtcttttgagcgcaagtctcggtctcgccggcgtcggcgtagttccagataccaccggcccagtcaccgcagagggtgctagtaaagatgttgatgttgtcgtaaaagtacttgtaagggtcacactgggacgaagggaagttggccatgggaagaccccactggtcaggcatgggctgctcggcggtaatgtcggcagggatctgtccacgttggaaccaccagacgttgatcccagacttgtcccatttcactgagagcgggatgcgtcgtcagtctctcgcgttcggggagcaatacacgtctacatctcgggactcactagcgtagacaccaccaccaacgttgttgaatccgtcaccgtaagcggtctgatccgtatcacggacaccacatcctgcaacggacaacataagactggtcagcccggacttgtcggtagccacaagcgacgagacgactcaccttggttgctggtagcgtacgaagcacagtttcggttgtcaaagttacccgtggtcaggtaccccgagtgcttctggttgtcgggcatggtgcacccgttgtcagtgtggatagagacctggttgatcttgaaattgttgacaccctcaaggatatcgatctctccaccgataggccagttggggccgttctgccaccaagcgggccaggtggcacaaccgacgggcatgtggacggcgtccatgaggacgagacctccggtgaacaccaacttgccgtgcagtcggacggatcttcggttaccgctgacgtattgggtcgtgtcgaccttcatgatagcattacccttgtcgttgatcgacacgagaccggtgttccactatgaagcgagcgactgggtcagcacggctagagacgcaaagcagaaagagacgacatcaactcacggcggtgccggcatcgacataatcgacaacaccgtgcgtaggatcgttgtggttccaaaagtcccagtgatcaaagaaggacgagcccgaccaagtctcctcgaggttccagagcgagttgtactgctgtccacctccgctggaggccgaggtctcggcggcgctgctggccgagctccaagcggtcgacgtcgcgctgcccgtagcaatgtgttcgtttccgatcttggattggctgtcggtctgggtggccgacgccgtctcgctccaggcggaagacgaagccgaagacgaagccgcggacgaggaccaagacgaagaagaggacgaagcggacgcggacggtcgggtagcgttgaaccctacctgggggacacattggttctttctcttcttgacccgcctcttggtcttctgactcgagctccccgtagttcgagcgaggatgtcgtcggcgctccgtcggatcttttcgagatcggggatgagcgacctcgcagcttctgccacggcagaggcggccttcttgtgaggagcgacgtgggcgtgtcgagcggcgagaccatcacgaccgggaaggtgagcagacacgccggtcgagaggaacgcggcggcggtgaagagggtgagagcggtggtagagtgaaccatctttgcaagagtgagcgaaaggtgataaaggtgatttggctaggtttggttcgtatggatcagcgaaggagatgtcgcgtcaagcgtatatctatacttcgacggcgagagggtccgagcagaacaagaggtggaagcggttgcgggcagaaattgaattgtttgttcgcgtaagggggatggatgacgaacaagagagtgttcgatgaagccaagccggttggaatgatgagggtggagttttgatggaccagatgcgtatgtttcgaggtgagaccaaggggtttgcgaggcgaaggaaggagatgcagcacagccgcgtcgttcgtcaggcgatggggcagagaatgtacgtgggggtatcgcgagtttggtcgaggagtgtggattgatcgagagtgcgtatagtcgggtgatgagtggttgtagagatataagaacaagagaagaggatggatttgaatgagtcaacttggtctcgaacggatggccaaaggggaacgagccgagccaggtcgttggaatggattgggatgggcgagagtgtccacgacgacgggactgcggcccgagaatcacgcgagatccaccatcactccactctttgttctctaaaggagggaggggggacgtccgtgcattgtcttttattatcgccctcgtcgtgatgggattggtagagtttcgaggtaaaggaggggggaatctcgctcggcactcgaacaaaagaggatcgagggggaaagagacgaaacgctcaggacggatcccggactcaccctttttgatgattgtttcgaagcgaactcgattatatccaccgagagacgagtgagaaggagggaagagtgacgatccgggaagagttcgaggttctttccctgggatttgagtcgaggtcgatccgtttgcacagcagcgggcgtcgatgtcgattcgagtagagtttagattcaagtgggggggttcgagggacgaggtcttttttttacgattgtttagaaagctcggacgaatgtcaaatatgggggagttggggatgtgggatgtgaggatcgtgaaccaaaagacttccaaaggaggtcaggcgagaacaagaggatcgtctcgaggcatatatcgatctggtcttgtacacaaacgatgacggcgacctgcacacctgcactgcccgcacacaacttgccacaacccgccatcccagagctgcccagcgttttgacccaacctcggacgcgatcccctctcctcctgttcctgccgctgtatctgcctgcgggcttctcgatagcaaaagcgtgggaacgcctcttccggcagaaacgatcgcgcgttcaggtgcacgagccagggggaagcgataatcaaagagacaaacgcgttcagccacctgtttttttctttttcttcttcttccctgtccggccgcttgtgccatcgcgacccctcttcggggtacagtgcagatcgattcagccatcgcttggcaccatacagatcccccttccctcacaaagcgctctcatgcccgtatcctgaaagacggttcagggacattccactacggccacccacctctttgtcccgacaaagacgcgttcaggcgtcagtactggctggtcttggctccttggctagaaatgacgcccgtagcatcgcggtgacgactcgaagcgatcgcattgcacattgaaacgtccggaacctcgccgctcggctgctggccaggtcgagaatcgcgtttggtactcgcccccagggacctcgctctttgtttggccgcaccgcacgcgtcaatgagatcccccatgcctttcgcattccagccgtcatcacaaaaggtctcacagctcatggtgtgatgtacgaccccatgagaccccggatagtaacacagcacagtctgatgtcgccggtagttgctaaaacggaaagcccgcgccgacatatttagagtagagttattctcgaaacaccgcaccccggcatgtaatcagtccccgatagatctcgcagtacaagacattattgcaccgatcgcttgccatcgaccccagacctgatcatgtccgcagtacaactcaagttactttgaacgcgtttcgagcagtgcccgtgatttcagcccaatgcgcagcgccggaatgtggtttacagcactttttgctcatcctccatggcttgcgcgcggtcgtcgtcattccgtcgctattatacacccctctcacaaaaaccttgaacggctcttccactcgcccacaacaggcttgggaatgacacccgtcttgacctcgtctgcagctcctgtttgactctgcgccgacccagcggctatggcagccatgtaccctgctggcgcatcctgtcccctctgtgcactcaaccacgcttccctcgtccgttcctcctgtccgatcaactcgtctttgacgaggtcgacctcggatttgtatgtccaagcggtctcgaggtccgaaacgagacgctcgcggaatcggtcgaccttggtttggagctcttgaccgagctcgcgatgggtagacgaagtcagaaggaggtggggaagcagattggatacttcgtctgaaatcacaagttccgaaccgagtttcaaatgatcagctgatcaacccactggtctcaggtgcactcgagattgtgcctaccgctcttttcttcgacccgagcgaccagccttccgagactgttcaacaggtactcgaattcgtcgatggtgcccttcttcccggctgcctttctccgggcctttcgacgagtgctcgatgttactctaaggtaggcgaccgacttctgtcaggtgaaggaaccgccgacgatattgatcgtatgcactcactttgaggctccagtcacgttggacgtagccgacttggcagcggtgaaacgcgtaaatccggtcactgccgtcgtcgcattggtcatgacgtcgacgttctctagcgcaggctcggattcgatcatgaaaaaggagtcttgaggtccagaacgaccgagatcgtcaaggatgtcagtggatatcctttgatggcaatcgacatatctcagccgactcacccggatcctggtcgaccttggagcgcaagtccttgatcctcttcatctccttgtccagttggccctccatctcgtcaaaggtgtccatgaactgttcgtgtgcgtcatccagaccagggtgtaaagctgattcgatcagctctgttctgccatgcagcgcgatctgcccaaagtccaagcaccatgaaatcagctgacgacaaggctgcacgaaggcatcaccacgtaccagtcgtgatgcctcggcaaattgagatccacgacacaaaacgtgcacagcttcgtctacaccgccaccgtaatcaagcaagatctgagccgcctccaggtggcgagcatgtagagcaaggtactctgaatacgaggaaagcagattcctgccgttcagcagttctctctaaagagagcgagcgagagtctcaagaggcttaccagaaacgcgctcgcacatatcgctcaattcatcagcttcgactttctcactgatcgccagagcaaacagctgccgccaggcgtgtgcttgctcataagcgaccatggctcgatcgagtctgtctcccaacacaaacgctggaaaagagaagcagatcagccaggtccgggaagatcgatcaatcaagcttgatctctaccttgtgcggcttccaaatattgccgttgctcgagcagaaactcgccgtaaagaacgtagatagcctacatgaacccgtcctcagctcgatgataactcgctcatatcgctggcagtctactttacctttaattcttcaggtcggtccgaccagagacgcagagcgggaatatataggtcatgtcgctcaatataatcgatcgcttcatcgaagtggcctgtcaaggaagacgttagccccagcaaatgcgggctttgtatagcgactcgcctcctgcatgcaagtgttccagagcccgctcccagcgttccaaatgatcgtctattcggaatcgttgatagtccttgtcaagtgctcgcaactctctcaggaacggtaggtattccttgggatcctggcagaggacactcctaactgagatctggtattcttctcgatattactgccggtaggcttaccttttgcgagtattgagccaccatgaggactagctggaaatcatacattcccaaagccacatcgtataggtgattgacgttggtcaagaaaatgatgtacttgatcgcatcctgcaccgtctcgggattggtagctaaaggcgattgaggccgttagccaggggtagggattcgtatacggctcggcatgagcgctcacctttcagttgcaagagtacccgaagaccgctctcgagatcagtaggtgttttgcaaacatgcgtcgtcaggattgtgtcgatgtatttgacaaggttcctgctttcaagctctgatcggatggaatcgcagacacgattgaccttctctgtgtccggcttagaagatgccctggaacaaagaggaatgatatttggtaagctccgtcgatgtcttcgcaagcaaaaaatcgcgccgtatttaccttcctccgctcatccgagggtaaagagtttgcgtgacgtcgtccacactgtatccagtatggaaatttcagacgattcaggtaacgagggcttgaggccgcgcgctcacctaagcccggagatgaacaagttgaggtagtcaacctccttgacttgatcaaggaaagccgaaatgttttgctggaaggttataggatcgacatcgtaaaggatattgaggtcaatccgatgacgccgacaatgtaagaaagctgatcgatatcgcttgctgtgcgccacaacaaaccagttcagccgtactcagtattttgatagacttggcagagagctactcacgcaaggatgtcgcgtctgaccacctccagaacaagtggacggggattaatggattcgaggttaccacgaggcatttggaggactaagctcattgcgctaggcactacggtgactatccttgatcctcgttcgacccgtcggctctcccagacccgttcgccttcggccagagattgttccgtcgcgagtttttgaaggatgtccaacgaggcgtactttgactcgtgagacgtcgtagtataaatcaggaatgtagacgacaggatcatggatgtggcgtccgtggcgaccgtttgtggctcatatatggccggaccattagacataagactctgatcgtcctgctctagttcgccctcgcgctgaacctcttttccggaagccatgacccatagcttcccagcagagttcattccaaaaaccagaccgtgagtagcagaagatagcacttcaaagcagaattctgggaatcgaacatctctctctgcagcagctatgttccgtgcatgtcagcacaatgcgaggagctcggaccttgtcatcagactgccttaccttccagaagcacagcttcgccggtagaaagaaccgccaatgcctcgccttgtacgccgaaagtcaatttgccgatcctgccactggtaggagacaggccacccgaggcactgatcagcacatcctggcccgtagaatttctagccaagccgcagacgtcgccagtagccgtgagcatgacttgtcgccagtcggcctggtccaggtcgaaacggccttcttgtacttgttcgggcttggcgatagcacctccccctcttgcaccagctcttgggatgcgggtatgcaattcgtagaccttgtatgagccgtcgttaagcagcacaacaagccggtccgacgtcggagcgaatgcgacgtgaacaggtaccgatgggagggagatctgatatgcggacatcggcggagggacattttgtgaccggaatggggtcatgagcagttgctctgcggatcgacaccaaaacattcagcacatgccacaagcaattggaaaccgagacggacaaacatacctccatcaatcacggcaacacagcctgtgtcgtctggaatcgacattcgggccgtggcggtctcccattcgaatgtcttttgcagcgcaaattctggagacggacgatacgttgtaagcaaatcgggaggtgactataggcctttccaaccaaccaacctttgccggtcagatacaatatacgaggattctcctggtgccatgcgactgaggtgaatcttgaagcaccggtggaaggaggcaggatctcttgcttgaggtagtagtggtaattattcatcgtccaaagttgtactggaggaagtcaagtgattgagccatacgttgcacatcgacgcgaaacgtgacaagttgccgatactcaccgagatctgtgtcccctcttcgtatccagactgccagaatttcggaatcgctgctataagccaactgcttgacattccagtcacactgtcccttcttaacgagcgattccttcccgtgataacgctcatcctcacgcaacctgaattggccatgttgtaatccgttacgctccaaaaagatgacgtccttgcggcctcggtcttcaccttcgccttccgccccgccgtcccagccgaacccctgcacggcagcgatcaagttgcctgatggcctccagctgatagccccctccagtccgtagatcggttcgctcgtagcactcagggcgactgggcttcttgcatacacccgaacctgtctgcggttgtctccaggtcgcgaagaggaggcagagtaagggtcgtatgaactgacacagaagaaagatccgtcccctctccacgagattgtcggcaactggtggtccgaaggattggcagcggggagacgagtcgccacagcttcagcagccgatttcccgagcgaaccgtggaattgcgtctgtttggatccccagccgacgttgatcatttcgtctacatagtggtggcggcgtgtcagcacctggtccctgcagcaagcatgggttgtagctacgcaccttctccgtaagcttctgtccgtagcggtgcctcatagatgacctcgaagtctcttgacatgacgacgagctggtcctcgcctgatgaggaataacggatcgattacagtcgtgcctcgagtcgatgtttcgaccagtgacttaccggtaatgaggacaacctgttcatcgtccggcgaccaagaagcagctttgataccagattctatgctcccgacgacatatccctgaaaaggagaggttgcaccatggccgataagcccaaactgacgtgggtccatcgtacagaccggcatacctgtacaacatcgtcctggtcgatagccgaaccaaagtcgtccgctgcaatcttaaataggacaatgtcacctccagaagtcaagaccgacaaagcagaatcctctgccagatatctgaacgagaccgcctcggaagcatcttcaggtgtcgagaaaaaggtattcgaagggacctcgagcaaggagatggactgagatacggacgatgagctcgattttcgactatgcaagctagtctgtagtactttgatagctcacctgcaggctatgtgtgttgccgttcaactccgccttcaaaacctccagttccaccattcccgagtcgcccctcttctcgctgaggacatagagagcgttgtcctcgggattcacggtcgtcttggtgatctggcagctggacccagccgcgctcgccgcatcgtagctccaaaagtcggaaaaggtggatgtgagattacgcatattatctacgctgtcgatggacgatcgcacagtctctgagcggattcagagctttcaaaatcggtttccaacgcttctcatcaaacttttcgctaagacctcggtcaactcgctcggccaactcgaaatatgctcctccccgctgaatcgatcgtgaccgctttcgcgcgcttgtgcctgtctattccggatggtcatggcttgcgctccttcaaccttcagctatctcacttctgggtcgtacatccttgatgcatacaatcacatgtagccctgctctctcggactcgtatcgtttcaacagctcttgcagggctaatttcgtacaagcgttacgtggcttgaatcaacccagaccgcaaggcttccgaccgctctaggagtgtgacccgagtcaacgacgataggctcatcctaagctcccctttaaatcaaaactcaaccttttttcatcctcgtctcgtgcgatgtcctatgtgtaacatcgagtccggaactcactcggttgacctggcggagagtgcagtctttacaagccgtccttgaccagcttcatgatcttcttcctaccacaagcgacacagcgaaattcaacatttgaggtcgagtcgaggtcgaacaagtcctactctacttacttttgtacattcgcccagctctgttgcaatgttcctcaactgggtcagcggcttctcatgcctaccgtatactcggctaaagacgtaccatgtgcaggagattcgggacgatgccgtgcgagttggcaacttgacacctatgctccgcggtcacagcgttcaaagcaatctccagcaactcgaggatgactctcgggtgagaagccttgaggggttccgacccggaagcttcacctatgatcgactgtttgacgtcggtcttcttgtgagcggtcttcttgggagaggccttggctttagggttgtttttcttgctcggagaggcgggcggggtagccagctctttgaaaaaatggtgctcagcctgagagaggacggtggaaggtgacaggtgctcaccgtcgacctcggactttactgcagatgcttcagacatgttctttcgggcttcgcgctaacaactatcggatgtctattcgagggggtcggatgaacgagacaattctgtcatgacgagatcgcaaattcctatgctgagagtcgtgctgctctttgactatggtccaccagcgtatgggaagtatcgttgctgcacttgcttcttgggtgatccacttgtatgggactcatatttcgagtgatcgccgccatttcattcggaaccctttttgttctgactcgttcggtatacccgcgcctttttgagggggccgggcgatatctacgacacccttgaagatttgagatgccacaataaagaaaagtgtgtatcgatgaaatttgatctgatatatgctcatgaaagcctcgacccccggggctttctcatctttttgtctttccggcgcctgacggttgttaccctgatcgtcgcgaaaccagctttggatcgacgggccgttttctaccccttgaattcgtaacccccctcgcgctgaacgcaatcccaatcgagctcttccaccacctcaccctcgagtcccgggtaggtcatggacacggtgatgacgtctttaggcttcatctcgcccacgccggccggggttccggtcatgatcaggtctccttcctgtttccccgccgaatgggatgcatgcgtggggtatgagaccggaccggatcagctgcagctccagggtgcacggttaagggtcgggcgagaggcagactgacgttcaaggtgaagatgctgctaacatgctgtacgagcctggggatatcgaactgcatatcactcgtctcccctcgctgcttggtttcgccgttgatcttgaggcacaacccgacacgggaaggatcggcaattttggacttggggatgaaggatctatagtgataggcatgttcagaacaacggtttagtagagtcgttgctgagaggagacccgtggatgggaagggaaattgaactaaccctacgggagcaaaggtgtcgaaacctttggcagcggaccaggggagtccttttcccttgacggcatcctgcatgttcctgcccgtgacatcgatagcgagagctaaaaacaggatagagagcgacgaatgtattggtcgtgtttactagtacgagaatgagctggggggagcaggaggactgactgtatccagcgacatggtcgaaagctttggaagtaggaatatcccgcccggcctttccgatgaccactccgagctcgactaaagaccagatgagattctcatgtcagcgatagcttcccagagtagcttgatgaggatatccacgatcttaccttcatgatgagcgatgaccccgcgagggatctcgatcttgcccttgccgtgctgcaagtagctgctcgtaggcttcaaaaagtagaacggctcggttggaaccttgttgcccagttctttggcatggtcaacgtagtttcggccgatacagatgatgttgcggccggtctttgagaatgtcgaggccatggtgaggttgaaggttgatctggggatacggttatctgtcaaggtcagctgtgactgctatcgcatcggagtttacgttctcaactcactagatggctgaatgggagctactttatgcctgttgtacgtgatcttgagggtatgccaagtttgcgtatttgtgactcgtcgttgcacgttggcacgacctcaaactcaaggtcgattgttcattcggttctggacctccgcacatgtccgaccacacggcgatcggaagcgaatccaacacgacaagggggtagaagccagggtcgtcgataacgcataagcacgttctatgttgtttatgcgttattacgaactctagtccccaactagcgtcccctctctccagctcaccaaccaagacgtcatccacacagccagccagggccaggaggttcaagcagacgacgacgtctatagaccgatagataacatcattcgcttggccagtcacgaacagtattctcgtattcttgacatatagactcgaggactagtacatttcatcttatcgacccgtaatcatgtctagactcgcccctctcgtcatcgagtaagtcctcgccggaccgggatatcagaagcggccgcggatcgaacccgctgaacatatgtttccccctgctcgactgcctatcacagcaacggtaccggttactccaagtcggtgagtcccgttgcaatgccagatgtttccttcatccccactcgatccatttcgatcctgactctctctcgtccttctccttgcagggtttcgccggcaactctgaaccctcgttcgtcttccccacggccatcgcgactcacgcctccccctcctcgagcggttcgggaaccggaggtcgaggcccccccgtggccaacaagcccggtcacctcgccagtaaacgcgggatcgaggacctcgactatttcatcggggacgaagccatcgccaattcaaagacgtacaacgtgcagagcccgatcaaacatggtcagatcgataactgggacttgatggagaggttctgggccaagacgatcttcaagtatctgagggccgagcccgaggatcactacgtcttgctcgtgagtcgggcctgctggaatctgcagagtgagactagcggtcggtacggaaaggctgattgtccgctgaatggtaaagaccgagcctcccctcaacgctcccgagaaccgtgagaacacggccgagatcatgttcgagagtttcaacgtccaaggactgtcagtcatgcctctgcaccttgatctcgtcggacgaaaacgctgatcccgacatggtgggtgtacattgcaggtacattgccgtccaggccgtcttggccctcgcagcttcgtggtccagcaacaaggtcgccgaccggacgttgaccggagtcgtcatcgacagtggtgatggtgtgacccgtgagtcccgcctgctttccggtggacagagcgcgtttctcaaatgacatgcgtgacagacaccatccccgttgccgatggatacgtcatcgggtcgtccatcaagcatgtcccgatcgccggtagggatattactcagttcgtcctcaacctgttgagagaccggggcgagcaggcgatcatcccgcccgaggaccagtggagggtgtaagtcgggcatcccctaagctagcctggtaatcaagcgggctgtgtgctgatacgagatccacgcatatgacagggccgagaagatcaaagaggattacacctacgtctgtcaggatatcgtcaaggagatcaaaaagtctgatgccgacccctacaagtactttgcgaggtttaccggcgagcacagtgttaccggaagggtcagttcgggatcgtccgctatgtcgaattccgcgcggagagactgacgcatgatctgcttgatggtctttttggatgttggcgacgatagcgctacgacgtggacattgggtacgagcggttcttggcccccgagatctttttcaacccggaaatctactcgtccgactttttgacccccctacccgaggtcgtcgacaccgtcatccagaccagtccgatcgatgtcaggcgaggactgtacaaggtgagtcgcgtcactttcgggttgattccgatgaggcgtttgtcatgtgctaacacgggtgcctctgcgtggacagaacatcgtgctctcgggaggatcgaccatgttcaaggactttggacgaaggttgcagcgtgacgtcaagcacatcgttgacggtcgaatcgccaacagcgagacggccagtggaagccacatacgggtgagtcgtggactgttcattggccagcatggatactggctggagctgaccggactcgccatgtgaaccaaagtcgagcggagtcgaggtcaacgtcatctcgcacaagcgtcaacgattcgccgtatggtacggaggaagcttgatggcttccctacccgaattctacaacgtcgcccataccaaggcgcaatatgaagagtttggacctagcttggtcaggaggttctcagtctttgggagcgcttcgtgaggcgggtcagcgtcgtgagaatatgaacgtgtgtgcagagaaagagcggaaaaaagaaaacaaggatcgagcgtctggacgatcgcttggttgtatctcgtccggttttgtgtgtgactctgtctggttcctgtgctcggataatatatcatgcatgtcttttagcttctccatcgatgttcatccggctcgcagggatcaccgcttgatggcacaagcggatccactatgtaaagttcggtttatgaaagggactcgagcaaatggcagggtcttcggtcacatgctacatcaattttcagcccagtcggaggatcgctcaagtcccgcaggatacttttgaaatggtatttgctcaagggagacagataacaatgatcagtgtgtcactaaaatgagtgtcgctttcccgcagcatctcacatatggcctatcggtcatcgcgcttcacagattacagtagcgttgctttcgccttgagcactttataggatcctgtccctccttatctgcatcttcctggaaaacaatccgatgcagtttgccgaaaagtttccgctgacggcctcgtcactgccgtcctaattggtcttagggcctcagccagtattcaaaatgtcgttactccatgtaaactccttgaagaggaacagaggaagacatagaaagatatgaattcaaggtgactgttccgcgggcaaaaccaggcgagaaaacatccacacgggttatcggaattgtattctgacaactggcgcgtcgactgcggagttggtgcgagtgaattgatgcctcattcacacgtcaacgtttcgcgatcacattccgggcgttcgatggtatcgtaagagactggcagtccagacatatgtgatacatatgagagtttagctttcgatccaactatatcgctcgatcgcctgttgttgagatatgtgagccggccttgtgaggaacagtaacaggagagaaactaccaccctgaagaattgaatcggacttgtcccggctggaatggccaatgcctttcctacgcatcctcttctttgactttaaagtacacgagaggccgtactagtactttcaggtggacaaggtcttctgagtctcatcccatgcagtaatgggagccctttgtttcattcggtaagggcacactcatttcagggggatctatatgtacattagcagtggaaaggcggttggtgggacctcttcccgacctccgctgtatatccttttcggagggaacggataaacccattcaagatggacgtttaatctgcatcggaggggacctaagcatactcttgccgggcgttgagcttcatagtctcgttgacgaggttcaaggatgctgtggtctggctagagctttatcatacatcgagactcaattggacgccagcgtctcgacattgaggagatgaagcatccgaccaagatccattgcaacatccctgaggcgatgcagtcacaagggatcaactcacatctcacattgcgatacgggccctgtaatatacccttcgccgcaccatctcctatcacttaaggcgtatcgccaaagtcgagttcaaagaacagagtgaaggcatattctctttggccttgacagcctgaaatgcaacgagctgtggggtgctgaagctccaacactctcctccatgcggcacgcataggtgtcgattccgctattccccaatccttcgaccatagccgcctgtaatttgatcagggctgtggtcgatagaaagaatgaccttgtgagctagaacctcgtttttgtacaggcttactactggcgccagccgggcgggcaaatgtggtcaaaaggctgcattgtactcagactaggaaagcgcactgtcttactgaatcactgtactgctgcggccactgagtgtcagctcattgcatcgcgatgctgaactgtttcccgatctggggcgattgtctgtattcaggaaccgatcaagaatccgccaaatagaacgtttgcaagcgagaggaaagaaggtcacgcgtgcgtaaacgatcagattttgatgaaacgtttcccatcaatgatcgcgtcaatgtggcgggaaatcgatctcgagctagctccttctacttagcttcaaattgaatagtagggtcagggcttcaaagtgaagtaatgcgagtttcatccaaggccggaatgcccgatataatatggattgaaagcttcgccaagagcccgtcgctgatcaaaattcggtcgcgcgcgggaagcgagacttggtagaaggcaaccgaaacgccggtcagggcacggattactttcgctccacgacatgcccttttgctgtgtaacgacggtggtcatgtgcaagtgtgcttcgattccgccaccgagtcacagcaagtatgacgacattctgcttgtgcttgatcccttgcggttctcctgcctgagaaaaacttgctgacgaaaactgacttgctcgtcatgcctgccagcgttgtctcttccgattataagactgtgcaacctggcgggtttgggagcactttcctcctcgccactctcctctcttctcttcaagcaaagtcgccacggtcgaacttacctctttgatcccccgctttaaacaacataccgacaacaagtaacatattgcctggtaccctaacgacaggctttgcaatcctggatcgagaggaaccgcggcaatcgacggatcgacgggtcgaacaagagccgacacggactctagctaagtctgactcagtcgtgagagcttgcggtcgcgtatctcggacattgacaagcaacgaatacctgggtgactggggctggttctcatcagtgttacgggagccttctccccgcgagatcgtgcacagcggtctccggaacaggagcggatacggatacgggatataatgtcgtcgtcattcgtgccccagggaaggtgagaacgatccgatctgcctttcgttcgcgacgatttggacagcaaaaatagaaaaacgttctcgagtcccttcggcgttcggcctggggacgcagtatccaagtgattatacaacccgcccaacctcaacgctcagaagcgatgcaggaggcaaaggcgtaccgcaagtatagtatctgctagtggcaccgtggcgtggcacctaggtgcccgtgtgacgcctcccttaataggctgtctgacagcagggatgtcgaccagtgcaaggtacgagcggtacgacctatcggattatgatcgatactgttgagtttctcttatgtagcgcctccgtctataatcgccttgttgtattcgaaccccagccctaccaccgttgtctacattccttcttgatgtgttacatgctgtttgtaacgactctataatctcacgtccatctgttctgaattcgattttatgacattcacattgacttcggtaccagtgattttcaaactaagtctatccaacgatttcgtcgagaaaggccagctgaaggtcaacacagtagctactcaaaactgctcgacggttttaggttcccggttgatgcaacaatcagtctcgagcaccgaccaggcgatatcgttcatctttcctaacgcagataatacgatcggaatcgcagtgtaccgtacatatgccgcaataatacattccgaaccatattgactctagctagattccgtcgacgagtgcgactacaacgctgatatcgtcctgcttgcctccaatgaaactgtaacctctatcgatcgccttgtacatgaacggacttgccccttccacatcccggctggcgctattcgctgctaagcacaaggcctcggagacccgctgaggcgtgaaggcgattttgacccggttgttcgtgcttgttcgcgagctcgagtcgggatcagatgggtagaactggttgcgggcagaaggggaagagaaggtcgaaaggacatccaagatttcttcgtcgaactgagaaagcgcgatcggaaaacacgatcagagtgcttgcaagggtttccgatccccccggtcgggcaatcgtccgtccgacgtaccagattatctgataacccgtcgctgcccatcacgacgatatctcccttttcgacttggatcgagaatgtttgagcgtccttcatcggctcgtcttttgagctggtaccgagctgaagcggaaagttgaactggaagccggatgttacggccgagcaagatcagccaattgagttcgcacttcaggatctgatacaggacttacgccgtgttgcatttcttcggtccgaaaaacgatctgacctctccgcacgacgatcactgcacagtcccccaagttcgcgatcctcagcttttccccatccagaaccgccagtaagcaagtcgccgaaccgagcacgccctgtacaatcagcgtatcttagccatcgactgataatggactaaagacaagcaaatttgctcacctcggttcgaacgcagtcgactgtatgctcgtaagcctgctgcatgatgatgatcggatccatctccccttcgtcctcggtttctatcgtcgaccgctgcgcttcgctgccccgttgcgactccccgcgtgttcgagcgtcatccgtcgagatagacctcctgatatcttgaatcgccttggcctttctacgtctgttacgcgccgtctcccgagtatccgcctcggctgcgcagaagtgcatgagcagctgcgaaaacctcgccgagtcctccttctcctcccgctgtaccgggtccgccgaggcagacgaacggaccgtcgacccgcttgtgttccccgtggaatgaggagctacgtacgtgctgctgtctttacgtgtttgaggacgtttcttgtacttgttccccccgacgccatcagagacgcccatcgagcttcgagcgaaaaagtaggcgtcttccccgatctggacagctcgggtcccaccgtgcgtgatcctcagggattcaggattggtggatgactgaggccaggaggtggctgatgtcggggttgagggggcggcggtggacgtggcagaggaggtggtcggggacgaggaggtggcggtcgacgatgatcctcccctggtcaacgttctgcgacccatacgcccggctactcttgcaaaacacgccccagttgtatcccccacccatcatcatcacattcgcatcctcgcatcctttcgcatccagccgtctttgtatcatgagattatataattccgaccgacccatctaccgtctcgtcccgtcagctccaacatcgcgtttgacctagacgacctctactccccgaccgcaactcctacttgcgcccctcactgcccctagcttgggcgggggcggcgctctgtccaaaaccgaaccgcacacctgccgccgatcggtccagcgtccggcctcgttccacctcgtcttcgccatcgccctcgagcttgcgcttctgctgggacggtctcgtcggcgtctcgctcgaatgcatcgcccgagggaccgtatacactgtccgaccgatcgggtaccctacggccgcttgaacgcgtttagagaggtcttgctcgccaacccgattcggcaacgtcggaccaaggtcaccttccgtcctgtttgacctggaatcgaggggttctccctgtggggattcgtggacgaccttgccgaattcaaagcgcgaggtgatgggcgagtgggccgaggtggtagacgagctcccaccggaagatgctttgagcggggtcacgcggggttcatcacggacgctagagacggctcgactggtactgatcgaggtcgtcatcactgctgtcgtcgttgtcgtcgtcaccctcgaggtcgaggtcgaagtcgaagtcgagggaggtggggagggcaagatggagggtatcgtatcatgtgggaaactagccgggatcgtcccgctatccctcgattgctgtgagaggattcccgaagaggcggtcgatggtctcaccggactatctctttgtggggcagatgcgtttgtccgggttatggcgcgagcagagccagaggatgagacggtcgtatccgggtccaaagggacctgctgtgtttgtggacgagacgagtgggaagcgttcggcgtagtcgcatcggtccgtaccgaagtcttgtcgcccaaagcagcaggactgatatgtgattcggatgactgctgaggaatcgttgtaccgctaggcgaaggcgatcggaggtaactatccataaaggcctgttcctcgtctatcgtcagtccgacaccagggagtcgcgaaagatcccccgggccgtccggtctgacggtactcgttgatgatccttccccaagagcgcttcgtgtagagtttgcattcccactcatatccccgaattgcgtgtctacggaatgtcgaacccaaaagctttagcgaaacgcatagtgaagacgtccctcctggtcgcactcaccgaaatccatttcacgcccgtaccattggccatcctggcccttccacgtcttgagctcggccgtggcgatccgtttagctcctcgaacgtgagactgaactagatgtgatgcaagctcggtcttggtgtggaaagttttgacacaccattcccagctgaaaggattcagatgtcaagtaaacgtgagcgtttcttgcttgttggtggtgcgcgactcaccggcatattcgcagctcggcggtttcactgttggacatgctcgtcttgggttctgtcacgattccaagcggaccggtactagatactagagattgaaccattgtttttattgcccctggacttttgcgagtatatatccgtcttacttcgatgagatcgagttgtcaacttacttgcaacttgccttcgcatttcgccgacgggacctggacgaagttagggaccgacttcgcgtttttgattccgttgagagcgagcgattgctttttggtacgaggtaacagaggaagagcagcgatcaagaaagaacaagaccacagggagaagaatcagctcctgaagcaaccgacgcaaggtaatcgtagccgaagcgatggtgtcgtctggtacagagtgagggatcgataaaaagaatatggacctagtaacccaggtcgtgagcaaaaagtgatactcccgctgaggcttgaactcaggaccttatgcgctttacaagttaaggcttgttaagcatacgcgctaccaactgcgccacaagagcagatatgtttggcaacagttttaacaaaatatctcatcttatcagagttatccgctgaccacttccgtggtctcctggatattccgaccgaacaacgatacaataatgtatgctatacacaaccgatctcggatcctggctgggataccacataatcagtttctccattcgagatgttatcacgcccttcagctagtactctgctgcggtccagtgtgcctttgctacgcaggcgagcaccttccgctcgtcacctcagtgaagcacggcggtcggacgagcccgccaaacccagaaacatcctgctcgtcaaaaagtcaaatgacgagccgaccacgatcgctgccaaaacgatcatcaggtgagtcgatacattaaccgatcttccgaagatgctaccggctgatcggtcgccttacgccagctcagccatctccgctcgacataccccaacctgaacatcctcatcgagtctgaagccgctcaggaactctcctctggcctgaccgggatcgcgatcatcgatcgcgagtccaccgtctctcccaacacgggcgtgcgaatatgggctaaacctgacaaagaagagttggacttgatcatcactctagggggggatggaaccatcctgcacgtctcgagcctctatgctagaccaggcaaagtcccgcccgtcttgagcttttcgatggggagtcttggcttcctgacgccattccgtgagtatcactccggtcgtataccggtgtctttcctggtacacaagctgaccctgttgtccacacgttgtccgtcggcagactttgacagtcacgaggagacgatcgggagcgtatttgacgccaagtacaacattttggagcgaatgcggttagcatgtgagatctttggggaggacgatcgtccagtcaagcgatgtcccactacaggtatgttcatggccaaatcatgccatgcagatactagctaaaagacctattcctgtcggtagggtggcaggtcatgaacgaagtgtcgattcatcgaggtcgataccctcatctcagcgtggttgatgcctatgtcgacggacaacatctgacagaggctgttgtgagattactttcctgtctcatcatcttgtcggctctttgacttgactgaaccgcgccgtcataccttcaggccgatggactcatcctggccactccaaccggctccacagcatactccctctcatccggaggcccgatcgctcatcctggcttggaagccttcttgctcaccccgatcgctccgaggagtctgagctttaggacgcttctcttgcccagtcagggagaagtcatgatgaaagtgagtccgttcgatcgtggtctgctcgtcccaaagtggctgtatcattgaccgcgatcgatccgacagatctcggccaaatcgcgggcgccatccgaattgtcgatggatgggcgagaagtgtgcaatctgcacccaggggaatacatcagggtgacgaggtcacgatatccgatcccctgtatcacgagaaaggacggcggagacgattgggtagcggacatcaagtgagttcacggtagcctagtccgtcttgtctcgcgtttgctcatcgtcataatatcgccagctccctattgcaattcaacgtcggattcaagaacagttcgctctggcgtagacatacgccggtgtagcgtgggcggctcgattctctcgtcaccgggttcggtcgactctacttataatgtatcggggggttacaactatgatacacggtatactcatctagatgcgcagatcccgtcgcttttcatgccttgaccgtcatcgacccgtaaatttccttgcctccgacccaggtcgacaacacctgcccggtaaatcgatcccaaacacacagatccgcgtcccagccaactcgaacagcaccctttgtcgactcgacttttggtcccattgccttggccggtgtcctcgtggcgtgatggattgcacgggagaggggtatcgagcaaaaggtcgacatgttccgtacgcaggtgtcgagcgagacggcagcgcctgccagggtatccgtcccactgagggtgatcgaatctcctgatttttcaatgagatgttcgggtgatcgccaggggtaaagaccgtcgggcaacgatgggtccatcaattgaacagctgggcacggcaaatcggtactttcagcatcctatcgcaacgaaatgacaggcagacggagctcaccatcagtgatcaaaacgcaaccctccgagtgactctggtaagccaaattgacagccatcggatgcacgtgaacgccatccgcgatgatgctccagtagggttttcgcgagtttgatcgtctcgtcaccgtctgcgcgccgaattgatccgtctccaagttcatgagggtcgtcctcgtcctcctctgttgagacatggacgaggaggggctggaagagagggcatcgtccgaggatgaccctgatctcgatcgggtaaagggaggttcgtcggaaggatcacatcgacgcggagacgcagccaccgatcggaccatctgagaggtatgtagcgataatcggccaggaccagagctagtagcttggttcatccccaagagcccgagaataccaggttctcggtggtctatcggcaagcaacgcgaggaatagaatcaggcgctgggttacactagagaacattagagtgattgaacttacgaagctgaggcatcgcgttgaagacatgggtgatcatggaggcaccccggttgacagcctccatcgcctgtgacgtagtcgcagtgctggatcgtcgacaaaccaagatgagcttctgctctataggcaatttttccgggggtaagacgatgactcacgagtgtccgatgctgaccacaaagccagcgtccttcaaccgtcggatactgcccatgacgccttgtaattcgggtgcaaccgtgattaatttgaccatttcacttcccgcctgcgccgatcttcctcgagctgccgtcttgaccggggtcaagttatggcctccgtacatgtccaaaaatgcatcccatccatcctgagcctcggtgaggttatcttgcgggtgacaacctggtttctggatcgagatgaaaggtccctcaaggtggtatccaaggatggagttgtgggcgcgcttgaaagcggtatcgatcgcgggaacgatgttctcataggatttcgacgtttgggactaggattcaatgttcgagtcaatatgatgcatattaatcctggatgtgaccactctcatgctcacgatgatggtcggcacgaaactcgttacaccggtgcaggtcaagtcacgagcggccttttccagcccatccaggtacgcctcctcggccgtacgacccaagacgtcctcgctgggccaatccgaaaagtctacgccgaaacatccattgatctgtacatcaatcagccctggtgagaggatcgcctgatcgaggtcgatcgtgcggcacgattcgagcacgtgttcgtgaccctctcctagcccattgtgagcgtaaaacgaggccaacgattggcgttcagatccgaaggtctcttcctcgtcgtatgcgatgtggacgatccttcccaacttttcgtcgatccagaccgaggcgggggcggtggtgaggctgccatcctctgggtcgacgaggtaggcgttggagagcctgaccaggggcgatgacgttggggtagcgttgatcatcttgggatggaatatcgagtgatttgttttcgagtggtagacccggattcgtgccttgagaacggtaccatctggtggattccactcaccctcgagcatataaacgtatggtcgacctcttctccggccatttgtttcatcccgacccgaaactcggccaaaccgccccgatcgtaccgagtttcgattttagcgcgcggcaaaccagagccggacatcgctgactgcggtaggggcgaggaggaggagcgctcgacgtgaccaagacggaatgccaactagaccggtcgatcagggtcggtcccaggtgaaaagctgaaatcttgaagaccgactgagtccaggcaaaggcgagttcgcaattcgcggaggtattacagcaggccgatgagccggtctagtatcgacgtctgtcgcggctcacatcgatgaacgctatgggcgtttgcaggtcgcgtggaaactgccctttgaccggaataccggcactgagcaattcaggagaatcccaaacagggttttgacgtaacttgttgatgggccgtggtggctcaagtccccaggcgatgctaacctctacgatgaatctgggtcgatttcggtaatggccggaacaagtcacgtgaccacttgccgcccctttcgcatatccgttcccctgagtgcccatcacagctgtacgagaggtttcccagttacgtgcaaactgagtctatcctcgggttgacaaaagcagccgatgagtgctggcgaaaggattgtcaaattcccaagcaacaactatcgcatgatgagaagaatttcaggatcataccttcgtgcctgcgacaacgctctgcccacgtcgccagtaatgcttgataactcctcagtcaaagctaggcgcaggtgcattccaggcagtaaacttgggcttgcactcataagccaaacggcctacttatacggaatgtatgatatgtccaagacatgtctcctttgagcgaaaagacgaaatttccatgctaacccgctacctttgccctctggctctaattgaatctttgggtaccgggacctcgttctctccatccacccgaactcgtctcagttcatcctgtagacggtcacgccctgtatagctcgacgtcattgtctcaatcagctcgtagcccgaccttactactttggacacaccgtaaggactcacgttgaccatgttcttgccgaccgctttccttcctaccaacgcgatgagacacttgttgacctttggctgtgggaggtccgtcgcgcctacaatctcgccgactgaagaaggacgacgtcgaatgaatcaaacaagacggtcacgttgacgaatccccgagcttgtcagccatgtcttctcgatgatgctttcggtgactcgctttgaaaaggcgaaaacaagggataggaggacgactctactcactcttccgaccttctgggttctggatgagctgggtcaagactttttccatggattgtctcgtagcctaatccccccgggagatgccccacgaaacattcaagcagacgagatcagaccacgtcgtgttgatgagacgtgaatcgggaaacgaaccggatctcctcctctgaattcgatagggagggtatcgatgatggccgtgatagcagcctagaacgagtcgtgatgcgtgtcaacttcgcgtgcagacaagtaaccttaagagaagtcgagccgacgccgagaaatcgacccgacccgaccccgacctcgactcacctctcttttcttcctctccgtcactcccgccgaccccgctccagttctcccacttgccgcactgaccgcccttcccctgcctaccgtccccgctgtacctcgtcctcttcctctcataccgaccctcgggatcccgctacccctccccacggccacacgttcacggggcggggattggtactcgtccggatcgttgatcatggagtgtacggtcgcgtacgtttgatccccagcttgagtttctgtttgaacgttggaggttggggcgtctcgtaggttaggggaatgaggtgatggggatgagggtgctggagggagagctgcgggtcgtatcatagggaggaaggagtgagcgtgggttcgcaggatcgatatggggtgagctgggcttacgagcgaggtctttggcacgcttgaagctgagatcatcgggagcctagcgagatacgagtgataactcgatcagcacaagacgagtacctgccatgccgcatctcctgcctactcacctctgtccactcgacgcagaacgcattcatcctcagcgcatagaggtacccggcgaaagcctcgttgaacgtgcccagaccctcgtgcaacctgttcatcgcctgtacattgctcgccagggctgcagcttcgtccgagaggtctagtaatggtcctgtgagaaagtccaaacccgagggggagatgtgggaggacgggtgaccttcttgagatcgagcgaggttggaaagtgatccggtcgatatgcgacgcagtgggtgtgagcgcgagttggacatgatcgccaaggggtcctggctaggttctcaatggactaatttgtaaagtccagacagaattctggtgtaagctagcgagctagtgaggtggtggtgatggttgataatagtggatggttgaatatatggatggtcgtggtcgaggtcgaggtcgaggtcgaggtcgaggttgtctacgagtatgggttgtgtttatgttttgtttacgtttcgacgagatgagactcatcacgaactcgaaagggcataagatcacctactctctgggtcactttcacttgctactttcgaccctatacatactcgcaattacatgtacaagttcaattgacagctagcaatagtctgcagtcgaaatgcacggcttgggaaggaaccgccaaccatcgacgttgaataccaacctcgatagttacgacaacaaactcgtccgtacagcctcgacggacactgtagcgtacacgtcattgaccgctgaccaccgacatctgggcctcttccttgttgcctactgcactcgcctctgcgacctcgtgataccatgaatctaggtctcttcgacgctggtcaactcggttgcgaacgaaccgatcagcccgatctcttcggtcttttcctcgtcggcacaaaacccatcgagctcgaacaacccgttcgggtccagtagcaacaacgtcggtctcggcgtcaacgtcaatcatatcctccacccgacaggatcttcctcttctctgtaccatcaccacccatcacatccttataacaacaatgccttgccatccgggtctggcggacgaggattcagccgatcgggcgcttcgggcgggttgacggggttgaactcggggtcgacgaggaatctcggaggtacgacggtcaacaacgacagtcatcccagtcatccgagttctccttggagcgtggtcacgttgaccgtactccctgtattcaacgggacacccttgttgaccccgatcgaggatctcaagtaagatacacaccacccgtcattgcgcggccatcattcctgtcgatctcgaaacccgcgtgactgaatgcatcgcacctcctctttcacctcgtcatagcgcactcgtctcggcgcacatcacctcgtccatcgcacgctctccacaggcataccactctctcctctcttccgaccttcaggagatcgtgtcttctgggatgttgacgcttaaagccaagctagatcccgtactcggcgatcgggaggggttgaagaataacccggcgaggttgatcgggagggtggccgaggtgtggggcttctttttcagtatagtaccggtaagtctgtggaaaagcgtggtcgtgggggtatgaaatatctgactttcagatcttgatgcaaatggtatattcgttgcacggctgtatacagtacatgcaaggcatctttctccccctatctctcctctcccggcaaaaccctagccagcccgcccagggctcctttacacacaacgctagggcttcatcggacgaagacgaacgaggatccgagatcacgaccgacgtccggaaattactcctctctgggttcctcctgcatatcctactacccatcttgccgaggttgttgtcggctttggaagtctcgaggtacggccccgagactagaccggggagtcgggcgggggatggtccttccacatcatcgacgtcggcgcagggtcaacccgggatccgtaaagacggtcttactgggcaaaccccggaatcgggggtgaccaacctgaattcccctggcttggacggccgacctggttctgcctcggattacccggctccgccgactcaggatcagttgggaaggttacagcacatggcgctgatcatctcgacgcaggcggaacggtcctgtttcttctcctttgaagggaccgacgccgagtcgagcagggagccgcgtggacagggtcggggacgaggtcaagatcgggatcgggatccgagtcagcatgacgtacgacggggtcagagctccaaccaaagtcggactggtggatcggataccgaggaggacgatctggacgatactggtgaatcggattccgattggtatgacggcgagagtatgcgactcgacccggacgaggtcgatcgtgatcgggtggaagacctcttgcgcgcggcggtcaagctcaagaacggcggtgtggatccgacgtccaacttgccgggtttaggggacaataccaatccgttgatgcggagtagcaacttgacgatgagctcgccgaacttggggctaggcatgggaccgggcaacgtacctcggccgaggagacgaggttacttttcgggcgtggcattgaggagtgataaagaggggtcgacggcagcgacgacgaggtaccctagtggctccagtcgggctgccagtcgagcgacgagcaggagtcgagatcgaggcgctcgctcagccatagaatcgtcagaggaagaggaaggggactatcacctcgacgccgatggaactggttcgagtcttcattcgaggaggatgacggatgagagcgggttatcgaggaagaggatggtggacgagtggggtgtgagtacgggtcatggcaaggataccgatcagacgcctacgatcaccgatcccggtcgacgtgtcgggaggatggacgtagggacgccgaacgaacctgaaggtcaagagacggtcagacctcgagccgcatgatttcatgattgcctggatttctcgatgtaggatgttggagttgtatggaacgagagacagatcgatatagatacccacttccgatgcagtaaaatcacgtgatgttagggaatgttcggaagcaaatttcgttccttcccggagatttctcggaagcaaattgagtcgtacctgggtgggaaactgacctcgaaggacgggaatcaacggattcgggtttggaaaacaggtcaactcagtcagcttgttcacatcagccctttcaatctctaccaaccataatctacaactcgcttgtataattctccaagacatgggttcgacgccggaagagacgagcaactctggcggtgcaggtggtgtgagacaacgtcgcgcctacgccttcgccgtatgtcatccccgcatgaacatcccgtgtcttgcctgtcgaccgcttcatacgtccatacgctgacgagctgatcatgtgcgacactctacttagtgtgatagctgcaaaaggagaaagatcaaatgcggcggcgagagaccgatctgtgcgggttgcctaaaataccgagaagaatgcatatacgggcaagttccagttctcccgctttccaacctcgtaccttcatctcaccgtggctctttcccgggaattctttcctgatcgatttgggacgagcaggaccaacaaccctgagcggaaatccacgggcgctcaacccatccgtgtcaaacgtcgtcgaacgtccagcccgagcccatccgtccggactttcgattcgtcagccgagagcccgggattacaacacctcgccacggctgctacccagatggcgaggagatcatcgaggagccctgtccggtcaaaagaatccacgccttaccccggtacagaacctggctcgactcagaggcatggtcagggccaaaatcagaatcaggggttcctgccgatgaacggacattcgcaggtcccattccagggtcaagctctacccccgcctcggaatcagacccaacacagggtggacgagcaagtcttttcgaggtcacaagaaccgcaggtgtgtgatctctaacacgaccgaaagcctgcctgctataaaaaatctcctgaccggtcaaactcgtcgattttccttccaaagtcctcttcgtgtcgaccgaaagcgaacggatgtacaccaaacagttgcaatccatacaccccggatcgcccgagtagttcatctccacgtgagtccctaccaatcgctgctctggccttgctgcgcattatcccgcttccatcgataagctgaacctcgagaaccggtccatggaacaggctcttacgataaaagggaacaagaggttcagtccctccgagcgaatgccaagcaggtcaggttgtgggaggtcatggctttcaggaatctcgagtgagtcgaccttcggcctccttcgccgtcttgttttgggtatgctctcgatgggcgtcgcaggcttgctgattcgatctggagcgacgtgtgattcgggatctagccgaacgggaccggaagcgtcggtgagtcaatcgtcgacgtctggtcttgaagagaaaatgtgcggctgagatggctcggatttggatcgtagacggcttttcatctgctggagacctactggtgctggcaggtaagtttgcaccgggacccgacctgaaaagagcaaaaagactaacgagatgatgggcgattgcagcaaccgcaatacctcaccgtttaccggccgacctttctacgtgagtcgtcgttgatcccaccagcaaggctcgacatcgtctgctgacaaggacatcatggtcactacaggcgacatgtctacacccggcccgtattgcaaccctttcctcgtcaacatgatttacgcgcaagctctccccgttgcctacccgtctggaattcctttgacatccctagatatgaacggcgcgccgttgcaaacgacgacgcaaaaggactttatcgatcgggcgaaactcgtcttgacggccgagctggacaaaccgagcagcgtacctacgattcaaggacttttcatcctcgccgggagcgagtgttctagaggaaattcgtcggcagggtggttgtatgcgggaatggtgagcgggaagactgcggctgcactcgttgaatttcttggacgtccggctgattcgttcaaccttcttgcaggcgtatcgaatgatgcaagatatggggatacacatggacgacgaaaacgatcagagtttccaggatctgtcgttagaggagaaggaagtcagacggacactttgggtgagttcgtatcttgtcggcatcttgccaatgtcactgatcgtaatgccgaatctagtggactgcctacacttgggatacaatgatgagtctcacactggcgcgatcaccgacatggcgcgagactggccatcagccaagagaattcccccgtatgttttggtagagctatcctttcactatatgagtcccgcctgacattcttcgcatcccagtggatgacacaaccgatgacatggtctggaccccatatgtagcagccgacggatgggctggcgtgcccgactacccgccataccgaagctatggccgaacgacctttgtctggttctgccgtctttgtacggtgagtctgcagacaaaaataatcgctcttgccggccacagtatctaaagatggcaaaatcttcgcggcagatcgtgaacgagatcttgaccaagcgatacgtccgaaagtcggcatcacgaatcaggtcggcagatttacatcacatcggcaacttactcgacgattggtggcgcgacctgccagtttgtctcaaattgaacccgatgaatctgccagaatggtgtccaccgatccacatattctccctcaagttagtcgtttcacttcttataggttgacctccgatgcttacgctcatttatatgccgacagcctcttttaccgcgcgactttgatcctgctccatcgccctggatgctgctcggacgtccctggactcgaccagaagttcaagagcatctgtctgcacgctgccgaggagattcacgagctgctactacttgacggcaggacgtttgcctaccgtaatctgctatacagtaagtggcgaacgaaccggagaggtcgacttcgtactgaatttgtcttcctgtagatatcagctactgcgtttgcctggctgcctctgtcaacgtatccgaaatacgtaacccggaccccgcacaaaaagctgccgccaaatcccggttagacgttgcgctgcatgtgctggaaacgggcagagccaagacgccgggaatctctcgctgcatcgacattctgcgggcttattcggcctcacagggacatcacacgctgggaacgaacgcgggtacacgctacaacgatggcttaccgagcttgcaaaataatggacccatgtccattagccatttgggttcaagcgcaccactgaacacctatccacccttggagtctatcaatggcgttccagggggtccatttcagccgacaggcgagtaccctttactgaacggccagccagaccctcgtgagtggtttcttcgcacgcagtagaacgatgaatctgacctcttgcgtttcaagtagtcgcggcgcttctgacaacaggcttggacatgccagatggggacctttggaactggttggcttttgccgaggcgtaaggcgcgacatgatcaatagtgcctacgcgtctttgcgactttcgtttgttcgtctggctacattctgttcaatagcggtcttgttacgatatcataatgctccacattgtctcatgctcgtcgcctcaatcttcactcgacctgcgcttcatcgtaaccaggtatccagttggcttgcgcaagaaaccttcgattgtgggcagcggttgaccggggtgaaccggggtcaaagtgtatcgttgtacggtggatgagatgatcaggagcaattccatggaagcaagactgcgaaatcatcgagatggacatcaatgaccttccctacgacatataagcgatgccaacaaagcgaactcactttcgaccaacgcatgacctaggtccaaagctgaaaggtataaaacttccgttcatcgccgtcttgtcttgctcgaaccatctgccgattcttgcgcaaatgagcaatgaattgtgtttcaaggagagccctgtcgactcaccgctcgggtcgataggcctcggagtccttgccccagactgaagggtctcggtgaacagtataggcctgtatcgaactgaaatgtatcagcctgcggcaaatatcccgctatgcaatccagcaagaccccttacgggtacactcagggtcattcctgcagggaagaactcgtcgcatactacggctcctccctcaggcacgatacggggcaatccaattgccgaggtcgagtgtaatctcagggcttcgtcgatacaggcttgcaagtaggggagatctttgacgtcctcgaattcgaaggcgacgaaaccgagttccttcgtctcagcaacgggcttgagttcgtccaaaagtttcgtgacgactcgagggttgttgctcaaataatagagaatggcgcaggacgagttcgaagtcgtgtccgagccttcaatgggggattcgatcagccttcgttccatattgcgctctaaataggtatgccacattccgactcacctgcaattagctgtgtcaaagcctcggccgtcaattcttctcgacccatcggagccccattctcgtcttttcccttcatcaatttgctcagcaagtcctgctgatccccgcccatcccgttctcctccaattccatcctagtcccgactgcagcgatggcgatgccggccagtttccttacgctctccaaacccttcgtgaaccagggcagctttttaacgagcggtcggagcattggaggaatacaccccatcgttgccgagtattctcctcgtctattcaagatctcgatagcgggcaggtgttcgaccttgcctgccgaggcggatccggtcgaggaagcgggggcggacacgggcgcgacgtccttgcctgcggacaccattccaaagggtcttccaaaggccaaagaaccgataacgtcgaacgcgaaaaagttgagccctacgccgcatcgaaagcgagacatatctaaagtcaatttgcgaggcttaaaagcgtgatgggttgggcactcacagtcgaggatatcgaacccctgagtacgttgagtcttgtcctcgctcatcttgtcccatttgccaaacaagttctgaatgacatcctggatatgcgtttcaaactcgagcacgtttttctgtatgcgccgtgatccgagttagcccttgactctggccggggcggtgcgacgatgtcgaggcttacctgggaaaagacgtgagagacaatctttctcttcctcgtatgttccttcctatccctcgtgttgaaaagcccgcgtcggatactgacaaaggcgtcgtaaaaatctgccttgatgaaaccggtcccgtggccgtatacgacggggatcgctgcggaagaggcaatggagacatggtccggtgcgatcctgacgaatttgcctgcaaacatatagcacccagaagagtgtttttattcagtggacaggttctgagagggcatccatcagcaggacgactaaccttgtctcttgtgcaattcgtgaacgacctcgaaacggtttcccttcccggcctgtcgggcgagccagagtctagtgaacttggccaagaacggtccggggtacttgtctagcttcctctcgggagacaataagaaggccagcaaggcgatcacagcctgtcaggagtgagagtttgcatctcagcctggagtacgatgttgtgagatgcgcttaggggggaactcacggctgagccgaagacgagcgggaacgagagtttgacgttttcgatcatggcgtacgttctactggtgatgaagtgtttgattcgtgctctcaaactggcaaccacatcgacctggacttgcctcatacgatgtagacgttatatacaagctggtcgatagctatatggtcgacctgctattcgaccgtcgtcattgcggggatccccgcattctcgatgccgaacggccggatgcaatcagcccaagctcggaagtaaattgctaaaatactaggaaccatagccggtccgtgccctctgtcgccatacgcgtcgccttagcgcaaatgaagaccggcactcgtcggcggggcaaaagatgatcgacctcgtcctgtcggctctgtcatctcaactcgcaaactggtcactcagccatggaagcatgccaaggcgtctcaagaacgcttgaaagataccagccccacgtagcataccgtcaattgtaggatcagcctgcactcggcaccaatcatgcggtgaggggcggcaccctagacgaccatcccggatatagcgagccgatatccggggaagctggtggtcggtcaggaggttcagctacaccagtggaaaggcgaagaccgcggcgttggattcggagcccagattgttcgtgcgttcacaggcaaataaagcggcagcggggcatcttcataccacttgtcaaatcggtcgcccgtcgggactggacgcagtccatggaccagtagagtcttgtcaccacgcgccgagtccgatcagcccaattggccaaagtaactataggatcttgcctgtacgctcagctgtgccggaaagaagcttctgataatgataaacttagtctcatggattgctgcccacgtacggaatctgcacatttcgccgaggaattcttacatgtgagggagttcccttgtattccgcatcgtcatcggggccgagaccgttcttgctccttcgaatcgatgtcgcgaggatggcaccccttaccctatgtacaggaaatgtttttgaagttgctacggggccgaaatggtggaattgggtcccagggatcgggctgatgagtcccgagagtatcgtcttccccgtggtcgtcttccggcgcaggtccaacgttgtgcatcatcgtggtaacagaacttgtcatcgataattacgataccctcaatgaaggtctagtagcgggatggaagttggataggaagtctaactgatcttcccttcctcgtttcgcaattcgagatcaagcatcaagtacctcggcaaatttatgatcattggaacttgcgctcgatctcggtggagcgactccagcgggaatgacgaagatttcataggtgacaagaatgagctgtcggtacaacgactaagtaacgggaacaagtaccattagcagtaaggatctgatcgacaaactgtatgaatcgatgccaagcatcacccatcaggaagctgggtcgagctcgctatcatccgctacgtgctcaatcgaacgtgaagctgcgacatgccaggaagagtggagtgacgaggggactggcaggtgatgcagaacagagaaagatctttcatgaccgatttggagttgttaccccgctgctagcaggccctcgcctcgcaatgggaaacgaggaggaagcggctcgcaagataacccgatcgtggccgcgattcccgtgagacgctgcgttgtctacctgtgatctattctttgaggtcttaagatagacttctatttctgtattcctgaaacggtatgtccaggagaggacggacgaaatctgggataaagatgtgccgttctgtctgcgagatgggtttgcgaaggatttgaacattccgaaacctttgtccgcccgtctcggacagtttcacaagagaaaaaacagcgtcctggatcacgatgtggcgttttgcgaatcccactgcgcataatgtgtcccgggccgatcgtgatcttaggcggcagggccggtacgtagacaacgtgatgtaccgcgatttcttccgtctcacacgtgtcggccgctatttttgcctctttcccctttggtgaacgcgtgacttggtgaatcttctcggttgcgtatgctcgccctacccctacccccactggcggagaatccacctaaccgacctgccttgatcggaatgcacgaagacagcgctaggatcatattcgggccaaagcaaccgtccatccgggagctcgaggtacatgaaccgtccacgtccggccatcacgatctaggtcggctttgttccgacaactatccgtcgtctcgattcgactctgaccagacttttatatatatccagggcagagggggccctcccggttgcctgtgattgtaatgcgggggtccaagtcaaagctgcgatacgcacacgattcatcgaacctcgcccccagtcaagatggtgctctcacccaagacttatacctttctctgtggttgctttgcggccttaggttcgatcctatttggttatgtgagcttcgagtccgaagccctgtcactttgcacaatgattgacattactcatctcgcaggatctcggagtcatcgctggtgtcctgccggccagccagttcttgaagaccatggacctcacagacgatcccaacggaaactggatcggattcatctcgagttccctcttattgggagcgttctgtggctgcatccccgcttctttggctgctgacaggttcagccggaggactgctagtgagtgattcttgcatctcttccccgcgcataacggtcgactcatggttgcacatcgatagtcttcgttggagctctctggtttatccttggtggtactctccaaattgccgctcagaaccgaggcatgatgctcgcgggtcgattcataggaggtttcgctatcggtcaactcagtttcctcgctcccttgtaccagaccgagatcggtaagtcctgtatcgccgaggacccctatgcccgacactcggctgactgtacctccgtctccatagctcacccttcgaaccgaggccgcctcgcgacgctgcaacaattcttcctcggaatcggtgcgctcatcgcatcgttcgtcgtttacgcctgcgaggtgactcaaccggacaccgtcttgcaatggcgtctccctctcgcccttcaaattctgccctgtattcccttggcgaccatgatcttcctgttccccgagagccctaggtcagtatgggtatcgggcgttcgcaagactggtgaaagaaggctaaccatgattgtttttcgcttgtagatggctgatgtcggtcggaagggaagaagaggccatcgcctcgttggcccgtttgcatgcccacggcgacatcaacgacccgttcgttgtcaacgaagccgccgaaatcaaggcaggggtcatgttcgacaagcaggccgagcaaggttggagaaaggttctcggagacaggtccaacttgcgacgagtctttatcggagtcatgcttcaattctcggtacaaatgaccggtgtctcgtgcatccaatactacgcaccccagatctttgccgccatcggattcgccaaggagaagaccttcttgttccagagtatcaactcgatcattgctcttatcgcccagggtatctgcgtgttcttctgcgaccgagtgagtgacagcgacggccggatgatattaccctaagcttacacgccgcggcgtccttttagatcggtttccgacccctcttgatctactgcaacttggcttcttccgccactttcgctgtcggaacgtaagttctgtctgattgctaccctgacctttcttcttcattgtactgatacatttcgttctctcgtcacagcgccttgcaagccaggttcccggccgaccccagcaacccggacgggactaacgtctccgctagttacgctttcgtcatcatgacctggttgttcaactttgcattttccctcggaatcggcccaatcagttgggctatccctcccgccatctttactacgggcatccgatcgaagggtactgcgctctcgtcaatgtcggcttggttggccagtgagtctgccatccttaccagcggtgttctgtatcggatgctaatcgtttatcaaattgcttccgtcgcgccgtcagacttcatgatcggccaagttagccctatcgcattcgaccgcattcgatggcggtactatgtcgttttctgcattctcagcttcaccaacgccatcgctatgtgggcattggttcctgaggtcgtgaataggccgcttgaggagatctcagcgctgatggaagccgaaccatgtaagccacgatcaattcagatctcggcgttgtccttgctgatcggatgtgatgtgacatcctcagggtttatcccccattcggcagccttgcgcacaaaagtgaagggaacagacgtcgaggaaaagatcgccgttcccgctgccaaggtcatggacgacgatgagaagaaggatgggaccaccatggtcgagcacatctaagtcgttcatggacgctcattgtctcttttccgtttgtgcagcactccacacgccatcctgagctgataattcgctaccaggtagactgtatttgtagttgttgaaggtcatggatgaacataccggctgtttttctgacgactgcattgtcacgaatgaatcatttctcttctaaacacataccgctcgatgcagagataattatggtatattgttgcatcctgatcgccgtacaatgaacgccccggccgaagcagcttgtaggcttatatacgcttgcaacaggagatgcttagcaaagcggtgtcgtaacggtagtaaagatcggtgctgaggacatgtcgagcagaccagcgcttagactagtaagggctcgaaatgctcaagtcgtcgaaatccattgtctaagcacgggagacaacggtgagagccgcgtttccgctattgagccgagtcttcacgctactatcataacatcacaccgggaacaaggtggtcggtggccaggtaaaccttctctgtctttcccgaaaggcttgcctcgatcgtaccacgaatcggacagaacgagaaaccatgtcttctatcgcttggccgctgcgatcgaactcgcaagccactcccggcatcgcttacataaccggatcgcagtcgcgttcgcgtaaagtatgccgttaagcggagtaataccggttgatcggacgtttatcggaagattcgcgtgatgatccggtggatctcggcgtagagtcgtcccttgacgttcgtgatcaggtcaggttgggctggtacattcgtgtcgagctggagtacaaacagcttttagtacctaaggcctaaggtagttagttcatcatcagagtcgtccttgactgctatcgattattttgtagacaaccagtatccgtaacgattatagctcgaccatacctctttcccgttcgaaacctaatccaagacatacatcctaaacatggctggaattgacccctatgcggctgctcctccccgcaacgtcaacacaaccgagcgaatcacgtttgaccaccccaagaccttgaccaatacgtccctctacatctctcctcgttcccttgtctatcccgctggcagcgagatcgtctccgacaaactctactctgggttcatcgagcacctcggtaggggtatctatggcggaatcgtcgacgatgacaagcaccccagtcctgccgagcttttggtcaagcaggacgatgggtctgagttgaccaagggcaggttgggatggaggaaagatgtcatggatgtcatctccaaggacggagagctggagatgcccatgctccgatggcccggtggtgaggaccattctctaccgtgtctactcacttcaaccccagctgatcacattctcatatggctactaaaaaggaaactacgtatccaactggcactggcaagactgtgtcggacccatcgccgaccgaccgaagcgtatcgagctcgcctggttgtccgaggaatccaaccatttcggtctgaacgaattcatcgactatgctcgaggactcaaggtcgaaccgtgagtaaagcgccggcggctcgagctggaaaaaggtccatggtagctcatactgtcttgacggtcggtgcgacatagctacttgtgcttgaacatgggtaccggtactttcgaggaagcgctcagcttgctcgagtactgcaacgggactggaaacacccagtaagtcgggtgcagctttgcatcttacggcctgaactgacaaatcggtcatgcatttgacagctgggctaacttgaggcgaaagcataccggtcgggacgagcctcacaacgtcaagctttggggtctcggtaacgagagtgaattcacttctagaccaccttcctgatcgtggcccgagctgacttgtactgactcgttccatagtgcacggaccttggcaagtcggtcacctctccgccaccgactacaccaaacaagccgctcgatgggcccacgctctccgtctagtcgaccctactatcaaactcgtctcgtgcggtaaccagggaaattcggagtgggaccgcgaagtcttgcaaggcctgatcggggtgtgtgattaccactcgattcacttttactcgatgttgggccacgagcgattcgctggacctcccgggttggagtacgaaaagaacgtctttgggccgatcgtcagtgtcttttctttcttcatgctttccacgatcgaggctgatcgccattcgttctcgctcaccaggccgcagaaaggggtatcgagatctgttcctctctgatcgacctggccaagatccaccattcgctcaaccctgaccaatacaagtttggcttgcctgacagtatgagcatcaacagtgggatcttgaagcgggagatgaagatctgctacgacgagtggaacgtgtgagtcccatatggtatccaaggggtgctaggcccggggctgatgatcgatacgtatgggtgaaccaggtgggacgagaccaaagctcccggttcggtcggtttggaacagtcttacgaatacgtcgacatgctcggcgtctgcgcctggttgaacatcttggtccgaaagtctaaggatgtcgggatcgcgtgtatcgcgcagagcgtcaacgtcgtacgtccaaggagttccccattcgggatccttggccattgaagctgattaattttgacatgtcatctagatttcgcctgtgatgactaggcctgatggcttgctcttccagaccacttactacccgtaggtctagcgttatatttgcgccgtagcaaagtaatgatgtcgatgtcttacacttatagcttgcgactgttcgccaagtacatgaagggaggagagctcctcaacctgggattcacccctgatagctagtgagtgctcagatcacggaatgctgtaggacgtagaaattcagctgactttgaggcgttatgctcagcaccggacccacctaccctgtctggatccaacacttgaccaaacccgcttacgtcgatgtcgtcgccatcatcgtcaagaaggagggcaagaagactagtatccgattaagcgtgttgaacaggcacccggacgcggcttgggagggcgagttgaattttgaccatttcggtgaataccatgtctccatgcgattttcttcgtgggatcgaagttgacgaggagtgtcgtttcttgcagcggtcgacagtgtcgagattcactcgatgtaccacgagaacatgtccgccgtcgtacgtcacaactgtccccgtcactccgctaaagcaccgagactgatgctcgtcctgtctacttccggtgtcaatagaacacattcgagaagcccaacgaggttgtgccctcgatcgagaagttagacagcaagcagtggaagggatcttataccgtcaagaagcattcttggagcttcttcatcttcgaggggactgttcaggagtagaagaatgaacgcggtagtcttgatctgtgtgtacttttgggtttcagagtatgggacgatcgaaagaattgtaatcgctcgaacctcaacgccgatatggtcttgattccgctcgtccgtggtccggaccgggtgacagtgacggaactaaatccaattccgtctgaaacttgattccgagagagcgatcgaccggtggacatcggaccggccccagggtacaacccccgacaaacggcttaaaaagaatgaccatagatccaaaggtcagttgtactcgtcatatctgcgagggttagatggttgtatcttgaagacgtaaaaatgtacgaacgacttttgaccgattttaaactcgcgccaagcaaggatggcgacaacgtcattcgcctggtcaacactcaagggtacacctggacgctcagcttgatcacggatctcgcctttcgaatcaccttggatggacccgagaggaaacttcctcctcatgacaatttcgcgcaacctctgccagctccccaatctttccaaaacctccagctcaatgatggtggaaagacgaaaaaggagatctcgtttgattttgtttcgggacagcaacttgtcatcgactacagctatgacatcatcctcgcgatttatgagactctggaaggtctacccgaaggcgacaaacggaggaggaggttgatgtaccagactttacccaatcgaggttactgtttgagcgaacacggagtcgtcaggtacaatcgggtcctcgaggggagcctgcacatgggcctaggggagaaggctgctccgatcggtgaactatggtcgagacactcgttcagggatgaaacactgactcagcgcgctctcaaatatcagacttgacgggccgagacttcaaacttacgggtacggatgctgctgcttacgatgcttatcagacagatcctgtaagaactcttcgagttcatgagtttcttagtcgaggtgatattgacgatctaccacctccactgcgtagctctataagcatactcctttcctcatcaccctacctcgcccgatcgccatcaaccccgagccatcccctacctccaacctgctcaacaattactgggcctctatcgacctctccgacccggtcacgggcgagatcaccaaacacctcgatcctaaagactggatccatccttctccctacgctacgtggtggacgagcaattcggatgggatctgtgatatccgaaggagcacgaatgacccgaatggggttttcaagaggtatgagcaaggatggggtggcttggaggagatcgtcttccttggtcatgccgagttgcaaggcaaggaggaacagtactcggtagagagaaaggctcttacggagggactagagtttggttcgaaaagtgatgggaagcaggggaaacggactgtcgggttgagagagctcgtcagggctttcgccgatttggctgggtcgcccaagctgatcccgagggattggctagggtatctcgcaagcggtaaatagcccagtgttgcgtgtctcccaaggccaacaatcgccgcgctaaacaatgattttatgggcgttaacaggtatgggcatcggcgagtccgactctcccccagctcaagaactcctcgaaaactggccggacgaatgcgccaaatacgacatcccttgctccgggatgcacttgtcttctggctacaccgtcggggacgatgggaatcgatatgtctttgggatgaacgagaagagataccctgatttcaaggcgatggtcaccaagtttcaccaaaagggcatacgagtcgtgccgaacatcaagccttgtaggtgtcggcattttccgcctggggaactctaaagctgactttagcctaccttcagacgtgttgaacacgcacccggactacgaacggcttcgggaagcaggagcgcttttccataatccgtggacgggtaaacaagtcatggcgccaatttggagtgcgggagtaggagatactcagcttggaagctgggttgacatgacccaccctcaaggtcgacaatggtggtacgatggggtaaagagcctcgtcgagctcggatgtgacgggatgtggaagtgagtgttgagaaggactaagcgcgaatgccaaatcctttgttgacgatgaatgcaccgtagcgacaacaacgagtatctcctgcataacgacgattacgagccttgttgggacgaggctacccgcaagaccaattcattcgagggaaaaaccaatgtcggaacgcttggacgcatgtacaacgtgagtcttgaggtgcaagtggaaaaaagatgcacgagaacgacgactaacccctcaatattcgtgtcagacccaactgatggccaaaaccagtcatgatgcctgcctagatgccaacccggaccgccgcacttttgttctcacccgttcaggtaacgttggaactttccgctacgccggctcgacttggtcaggagacaatgtcagtcgcattcaatttgtgcatcgccttttcaatatccttacttgtgaacgcaatagtacacgaactggaagacccttcgtgggagcgtagccatgggtttaaatgcagggctatccttgatgcaggttcgtttagcaagatctagcgatcgagcagtcctttccattgataatcttttcttttctcagtcatacggaacggacgtcggaggctttgccgggccacttccctcgcctgagcttttcgtacgatgggtacaattcggttgcaccaactcgcgattctgcatccacagcttcaagcccaacaagggggatcttagcggggctctgacgaacaacttgccttggatggtacgttctcgagcaaactcttgctagacggggacgcgcaagtgacgtggatccatctttgcagtatccagaagttctgcctatcatcaggaattctatcaagcggcgatacgagttgatgccatatctgtaggtagacccaatgctttttgcgccaattttcattcgactgacacagccgtcgatagcaactcgcttaactgggaatcacatttgctgtccgagccgcccaactcgtaccttggaagcggcgcctttgcccaggacccaaacctttactcggccgaaatccttgaggggttcgactactggcttggaacaggtcgtctgcttatcgctggcgcatttgaggagggacaaacgaggaaaagggtctatttccctcaggcatactccggagacaagactccctacatcagggtcagcaaagaacaaggcgaatatgaagcctatcctgccggcacgtgggcagacataaacgtcccgctatctgaaaccgcagtctttgcacgtgcaggcgcggtcattccagtcggcaaggatcatgttaccgtcacatccaaatcgggacttcctagaagctgtgttggtggcactgaagtcgaaattagccaaggggactcatcaacagccgtaggggtcagcctcgacgatcttcgaggggtagaaatcttccccccctcggccgatctagctacagggttcaagggcgagggggtttgggtcgaggatgacggcgtatccaaggaaccgaaatcgaccgtcatcaaggttagctacgttgttgagggagacgacatagtcgtcaaagccgaatggttgcagcgtgactttgttgtgctttggggcgaggagctgctggtctatttgcctcaaggcgaccggcgttcagtgaaggggtcgcagcccagaagcgctgccggcagagcagcctggaccgttagtgtggtctgaagcgacatgttatctgtgtccaatgttcatctgcatgtgccaattcggaaattccttgtatatgacaggcctgtcccccgtatatctgattttgtgcttggatatcgccagggaatccgggcgaggttcattggcgatcatcagcgctatgttccgcgttcgccttgacatgacaggattgatacaggcgcgcgtctcgtcgtttgacgagatcaaatgtcacgacgctctatcagcaaaaagccgactatggggttctgtgtaaggcacaattcttagtcgacggacggccttcaactgacggtctggaaggctccaagcaaagtattttgaaactgaacccgcgccaaccttcatcgtcctttgttcctgatcacgccactccacccaataccgatgtcatctgtcccggaggcgatgtagggaccgcatatacttgctcatttagcaaaattaaagtcgaacgacagatagctacgggactcatgggtatcggtcaagggaaagctccaagcagccgtaaccaggaccatggtcgagccgtggaacaattaaagcggggcgtggagggcctggcgacccttaggtgaagatggacccagtcgcgatccgtcatctgatcaggtgacgtagttgtgcctcaggagaggacgatccgttgtacgctcaccggcagaacctcgactgaatgtatgttggggtttaatgaacgatcacgcagtcagggttcctcccgatcaaggcgacacctttgttgaatttgacatcacatgacgagaggagaactttgagtattcgcgacaaggatatatattcatgtatgtcggttctcaagcagtatgggttcgtcaagccggagcggtatatttatcacattcggcagaattagtgacacaatggtcaacttcaaagcattgaggaataaatttcggggtaaaagagctcccacaatgcaagacaacactgattttgattcgtaaacaatggtcagagctttcctaataaattcaggctcatggagctgaatctactacaggactgaatcgcggactgtcagttccgcaaatgaactaactccctctggcccagacgtaacttcccgagttacaggcacacatactagtacaagtggttctagcactacttcttcctttgacccgcaagatcggttgtttcgccacttgagtggacccgacggacaaagtcatatgacgtccgtgaaagaccgatatcctgctggacaaatctccgggatagatggaggggttcacattccgaaatatccagctaccaaccgtcttttggcggaactgatcaggatcctcagcagcagaagtcccttccgggcgcaatcaatggcacgaatccagtacacccttcacgacaatggtctaaccagtcgcaaggtatgtacgtccttatcagggcaatatttccgggtagcgttcactttatcgtctttgatcggactatttgcacttctggtatcgatgcatctgtcgtctcatttcgcttgcagcaaacggcaagccaagcccctgggaccaagcgggcgccggaaaggcagaacacaaagcggaattctttctgtccaacgaggagaagtcggccagacaggaaaaggaagatttcgcgaaacgccaacagcagcagggtagtcgagatgcttaccctgctcctggtcctccccagggaccggcttcagggcagttccccggctacggcggaatgaatggccagccaccttcctcgaatgggcagcacggctattacgggcaaagcgggtatcactaggaattagacgcataaatatcatcgctgacggagcctgcgttgttgttgtgactcgtgaaaacatgactattcccgttgtgcgcctgcctttcctgcacctgagatttgcgtgtcacgccagagaacgtattgttgcccgatgttatacgatcgaagaataagcggtcaaaacatccaaggcaaatttcctcgtcagtcttccctttctgatattacgccttggtatcatggtctcgaatgatggccacagctctagatgctggcgctggatggcatttaaccgtaccagatcgcctgaaacgccttgcactattgcgcgactagtctctctctacgcgtccgtgatgacgtaatcgatcgaaaactcgctcgtatattgtcttctcatcgctcgtaacgagattatccctcgctcgtgtgcgtacttttacccctatttgaccttgaatcccttggcgaaacgtcgattctccgacctagttccattcgctcgtgtaggtcaagagctttagcttgtcaatctctacacttcctcaccaagggctaaatgggttgatcctcacgaccgagactggtctgtataataattgcattgctcgtccatataataccctagaatccacctcgacctcgtaaactcaggcatgccgctcttgccttgtctcattacatcacaagtcaaccataccttcactaacatcgatctcgacctcggatagagcgagactgccaatccgtccgcatcttcgatcactcgccaactacaatgtcgtccgagtctgcggctaccacttcagcgacctttcctcacctatcagacctctcgccaacatcgctagagaaagtggaagatcttgttgagggcccgcctccattatcgagagccagacgtatcggacttctctcgatcgtgagtgtctctcttattccctctcttgcctttcaacagatcgactcacagccatgatccttacgcgtctgaacagttctgctgcgctcaattcgtcgatgtttacaatgccagcgccgtcgtcctcgcgaccgccccgatcgccaaagacctggatatgggtgccggggagagcgtatggacgctcagtgcctacgtgctcgtctttgcctcgtttatgctgcctgttagttccagtctcttcctgaattaattcgaggtggatgctagtactgacgaacccatcgatcttcgtctgacgatggtagatggggaaattggcggacatttggtcggcaaaggccgtcttcacgatcggactcatctgggtcggagcgttctctatcgggattgccgtggcgcaggacaagatcatgctctttgttctccgagcgttcgccggtctagggtgagttatacccggctccgacctctctcgtcttatcattgctgaccatcattctgcttctcgaccttaatcacgcagggctgctgcctcgatcccagcggcgttgaacttgatcgtccacatctttccgggagagatcgagcagcacgtcgctctcgcctgtttcggcggtgctggggaactagccaacgtttccggtttcattctcggtggggtcctcctgctggccggctggcaatgggtcttttggctccttcccatcgtctgtttccctatggcactcgtcacgttcttcttgatcccctcgcgaaaggacctcaagatgtatcagctcgccggactgcgaaaggaaatcttggaagggtccgaaagagcggcaaagatcttgaaggcgttggaggcttccgagatgagcaacaagtttgattacgttggaacttctttgatcgtcgccgctgcggtcctggcgatctttggcttgacggatggaggggagagtgccggatggtgagtcatttagcaccgtcattgattttgttgctcgacctttagctgatcaaccgaccatggtcctgcagggcccgagctcaaccgatagtttgccttgtcatcggtttgatcctctttcccgtctttttctggtgggagagcagagtcgatcaacgggtcgctttgatccctagctcgatctggcggattcagaatgtcaccatcttggtcgtcgtcagcttggtaccctacttctggtgagccataagagcgagttcggatcgtcgcgatcgggaactgagactgacgggattcgataccgcaggtggtatggagtgcagtacaattttgccaatatcatgcaagaagactgggacatttcgcccatcatgaccgccgttcgattgtgagcccccgtcgtctcatacactgcgacgaccctgcgctgacatctttgacacccgtctttacagcctgccgatcagtatcggaggaggtatcatgttcatcgccatcgggtatatgcctccaagtcttgtccctttgaagatcaggatgatcgtcggcgccctgatcgctgcggcggggtccctccttttcgtgttcgccgacggagagagcttttactggaagttggtcgctcccggcatgtttatcggtagtttcggtgagtcggtcgtgcgatggctggacagcaacaggcatgagctgacaggaggctcggcgttgcaggtatggcgattgttttcctttgcgccaataacagtatccttatgagcgtccctcccgaatactctgggttagtcctgacattgcctaagatctcgcccctgaaagcctcggtctaaccgctttggtcttgtacagcgtggtcggtgggattttcaacgcttgcttgcaactcggcgctgtgacaggtctagcgatcctggggaccatcaaatcgcagttcgaggaccacagctcgacctcttccgggcatgcggcgatcctttgggaaggttaccgggcgtctttcatcttcatgacggtatgctgcgtcgccgtcgccgtcatctcggccatctggttcaagaacccgttggctactgtaaacaaggaggggagtgagaccgtcgaggaataatagactagatcgtcggaagaggcgacgggacgacacatccgacatttgtgcgggcggatgttgccacgatataatagagtttcgcaggcgcaaatcaaaggtagaccgaattcattgtatttctgcaccatacaccatcgttgtatccatacctctgaatccgactctgtcgagaactcgccaaagaccgcggtctaagggaactttttcgcacactccctcctcggtggctcgacctgatcccaaatccccttgcccatgccgacggggatatcctctttcccctcgctcaaggccgtccaagcttcgtccgtaaactcgtcgaggggcatacccatctgtcttccgttctcgatgtcgggttgatgtttcttgtcgtgcaattcggctgaaacgcacgaggtcagaagttgagaggttgggtcggatgggtggcagacggggagggaagaggtgcttactctggacggacggggggaagatttcgatgatcttgatgttacccggacccgaggccatttgtttcctcaatggcaagaccatctgatggagggccgcctgttgattcacatcgcgcacgaaaccgaaacataccatcagttcccgttctctcgacggtcatcactaccaacgccggtagtacttccgggctcaccttggtagcgcaataattcccacacctcgtcatcggtaccaaccccaaaacgctgcctaccatgacgaccgccgtcttctcctgctccatctttccttggaaatggggtaagaaccatctgagaaaatgaacgtatgaaaaatagttggtcttgaattccatgtcgatcgagtcgaggtcaatggaggacgggttggtaaagtctagggatcgttggataccagagttgaggaagaggcagtccaagtcagggtgggcggtcgttatcctatttcaaggtatgcggggaaggcgacgggagggtcagctacgatcccgacgacgagcagcgggaaagaggtgaaggagggtaaacctacttttccgcgaattgctggattcccttgagatccgtgacatcaaaggcgaccccctctgccctatccttgccgtatttctgctcaaattcgtccagcttttcttttctcctcccgacgacgatcagcttggtatctggtcgttcgaggaggatgcgttcggccatggcatggcctatgcccgaggtggcgccgacgaggaggattttcttgtagttgaagtcggacatttcgtgagtgatcgtctgaaatttgagtgggttcaagacggcgagcaggcgctttagagagtcgtcttacgtcgaccgacattgagagtggttatatatatacttgctattcccttaccccctccctatattaactctctaccggccggttgctcgatcgacctccactttttgcaaacgtcatctcgatggtaaaattgcttccggactggagctggggggatcgggagcaattcacaagatactttgataacaccgagcatgcgagatgacgtgttaaactcgaaatcgcctcaaatcgatttattgatatcaccactttccgaccagtatagggtcacttgaacaggttgaacgagtgtaaatcgagcctctaacctacagccctacagcttcacatagcttgtcacttcgatattaactatcctcagccctgaaaattactcggaagatgtcgtcccccgccgctccgaaaatgtaagaccagacttccagcaccgatagcttacccggcgctcgaggttgacacccaactcgacctgtcttgcaaccctatagcctggccatcgggtcacccaactcgtccttgaaaaaactggtcacaaaaatcacggcatttcagacgaattacgggccgttcgagtgtgagcatgtcatcgtgttgtccattcgaagatcagggcgatgttagctgaccggggccatatgtttactgtgtctctatacgcatattctacattcttgccggatcacactgcgcggattcgtcatcgacataggctgcgtgatcgtcggaaacctgttcaaaaagacggaagatggttcctcccttaccgttgacctgaaatgtgagctcttccaccggatccccaagccaagccaagccaagccaagccatctcaccccgactcataccccatcctcgatactgatctgtacttgcgataacacgctccagtccccatccctacctacttttctcacccgactcatcaactctctgaacaactctccgtccggctgaattcgggatcgccagaggtcttgcctaatctgatttacctggggaagaccggggtgttgaagacgagcggtggggtgtcgatagggttcgtagggggtagcttgggcttcgggtcagacgaggtgagtcggttgtttgaaagtacttacggggtttggcttgctagtctgacgagtttacttcgaacgccttgaacgggatacgttgtgtaggaagagacgccttctacgatcacgacggccgacctcacttccctcctctccaatccgacctttgtcgcacacactttacctcccgtatccaacccatcctcctcatccaactcgatccaagtcaacgtgaatatcaacccgacgacttcgggctcgaataacggtacggccggaccgacgttgacgctctcccaggctcgggctcaggcgcaaaaggaaatgagagaagcgtcggtgccttcccaggccaaggggttggatgtcttgctgttgacgacccctacaccgaaattactgtccaccttgccatcggcaacatcatcttcttcaccagggacgatgacgactgactcgcccgagctggatacgatcatcgcccgttcccgagcgcggtacatcctctgtccctcgcagctggatagcaagtcgagcgggtacgccgagtctgttccattcgggtggacggggcaaggtggtgggcgggacgagcggtggacgagggtcatccgggtggataggtttgccgaggaagaggtcgtcgaaaagggagaaaagggggagaagaaaaaggtgcgtctcccttgaacgaagtttgcccgtaggggaatcagctatgtcaggagctcacacgtcgggggctggtcacgatcgatagttcttttacgcgttttccttgcccgacctagctaccaccccggtcgctcgaccagagatgttcggaccgaacccgtttgtcaacccccgggggatgaagcgaggggccggtggggatgccgagggggatgacaagcgatccagaaccggagagtatgtttgtcgaatatgcaaccagcccggtgtgagtcacggacatcgatgtgatcctagcgtctcgcatgacggacgattgatcgtgcccatatcatcggatccagcacaatatccgggattgtccggaaaagggcaacaaacctcggccgcctccacccgagtatacgtgtcaccggtgcaaccaatccgggcactggatccaggattgtccggaactcccggctggggggaaaaaggagatcaagatgttgacgatggacgagtgttggttctgtctcgccaacaccaattgcgagtgagtggcatcgtgtgcgtgttcagcggtatggtgagagctgatagattcaatcgacgtgtttgtgcgtcttagtacgcggttcatcgctgcggtgcagaatgatacatacgtggcgttgtccaagggacagttgatcaagacgggggatagcagaaatccacccatggttcccgggggagctcatttgctggtacgttccacggcggcgcgcatcaagccgatgtctgccgaggctcaatctgcacgtcccgtagattatccccattcaacacatccccaacccgttgctactgcccgaggacgaggcacgtccgcttttggccgaaatcaaccagatcaaggatcaggttcgacagacgtttgccaaattcgacgccgcgcccgtcttttgcgacatgtatcggaatctcgctcgagcgcagcacggtcagatccaggccgtacccgtacccaagtcgagatcgggcgagctggagggcatgttcaggaaggcggccaagaaggaaggctgggacttcgaagagggagacgcagatagcttgttaaaagggggcaaggggcgagagttcatcaggctggatctaccggatggcaagtcgctggttcatttcattcaggggaaattcaacctgcagttcgcaaggtgagactaccccgtttgcacgtatgggggtatcgagttactgattgcattttggacatggtaggcaacacttggcggactttttgggcacgccggatcgtgccaactggcaagtttgtgtgacatcggacgagcaggtcaagcgggacgtgaatgctttcaaaaaggctttcactacatagctggttgtattgatcgaacacatgaacgcttagcgaggtgatgggtggcgcaattgcagcgaaaactacctgtgtaccatttctcacatccagatgcttgttggttttgtaccttgtgtcggtcttaatcgggtcaagaagcatgtttcacgtaccgcggcatcctttttagacacgaccacaatatcatcggcttgcacagcctctaggcgaaagaggcaggagaacagggagccagcgatgatatccgccgtcacatgcgcatggtttataggtttcaggttgctatttagtactcaaaggaatcgctgagccttcgaacaccgcctcgaacgatacgcgtatatatacgtatagctttatgctttgagatcgggaaaatgtcggagcgaagcgcttggccatcaataacgataggacctctggcttgatcatcaatccacttacacctcgaacacactcacaacaggtcatctgtctctttcacaatgagcaataccaatggtgcgacgtaagatttcaacggggaggctattcgaaccgcgaccgaggtcagcgaagtctttgggcgattccacgctgaggcgaccaaccctcaaaggaagaagccgaatgcctcgaacggctctgaaacagccagcaatgccgctggcgaatcagacacagctacaggttcttcgtcgacgacgaattacgatatccgatccacaacctctcacagtcagtataccggcggatcatactacgcccgaggctccaacgcctagtcaatcgccgtgatgtcatgtaccacttagatacgaaggacagaggtttactgtcagattagattgaaatgatgtccgtgaaatgtcgtttggaggaacagagaggcagcggtcgagttgtgaggaaagaccggaacaccgatgcagcgcgtgatttggaatagatcggtccgacattatgtcatgtatatggtcactcaaggacatgtcctgatatgactcgccgagatcaatagatcagcaagcatcacgagcgctgtataggtaggtacccttatcatactgttattttactttgggcgtaagccattttggggaagtcaccctgcctgcttggctgcggtagttgttaaagaaatgctagcttttgatttgaccaggaatttgtcacacgtttttcgcagcagatgcaggggctcagattggaccttgctcatagataatcatatggtaaagtcatcgagagagaaaccgtggtccgtctttgaccccatggatggctcctgcctcaaaggatgccgcccttccagcttgaggcgggtgccatcaagaacccgcctcacttcgcgagagcatcttcgtgtcgttgcccaacccgagccaaacaagctaatttagttgatacgggggcgaacagacgaatcccaatcgaatttcaagccgatttgcgggcgttaccattatagtgcacgtaaggaatggaaaaaaggatggtttgggctatgtgcgacaagatggctagtaaataaataatcgattcagaacggatctgatatttgaggataagacacatagcttctacaaggaatgtgctgaagtaaggtctaggagatgaaggcaatgagtcactttagtacaacatcagtcacttgagctcatgggcgcctcgcttgagctttgacctatcgtgtggagtaatctaccctattcaacagtcttgacaggtgacttggtcaagggtcgattgtttcttgtctctgatagcgagagcagtggctaccgagcaatcaaaagtttccacttgcacatgactgcgagctgagaccttcagctcgcgtgagcaatcctagtcgctgcgtccgcagttccgccagggcgaaagtttccggtgcgtcacgtaacctttctcaatcctgctggccttgtaagatccacaaaggagatgcctcgtataccgtttcaccgcgttcactgtagggatttatagtgtcaagcccatgtttgaatcggatttgacgcggcgaagcccacatggatgggattacatgcttcttatcccattcttactaccaaccttgcccgcacaaacactccgtctctcagaattcaagatgtcgtcgggttatcattcgccctacccctcgtctatggaagattggttccccagcactctagaaccatcaagaccgtcaccgtcgcagcttggatcaaatcttggcatgtccgatttcgtccgtgagatggaggaggaagatcacaccgaagctcagcgtaatcatatccgatggcaaaacatcaaccctcagacaggtcgcccataccagcggaccggtccgatctcgtgtgactataacgatgagggacgactgagcggttcggtagcatttcctgtttcgtctagcgtgtgggaacttgataacaatacaggaagtgaagctactagaacgtcccagggtccgtatgcgtccgagcgggacgtatctcgatttctgcagcaaggctccaagtcgccgaaatggaagttcgacgatggtttctcgcctatcgagagcggaggagctagcgtcaggtctgaatcccccgtcggtagtctgggctcgtggacgaccggaaatccgggctacgccaacccaacacattcgcgcccaacgtcgaatcagtatctggaggtacccgctaggaaccagttcggtcgacagactaagtcggaaccttctacccctccccattcttattctgcctggagcggaagtgatagcaatctattaggtccggatggaagtccacagtccagccttttcagccatatcggatcgatgggcaggtcacctttcgagcttcctcttcgaggaggtatggacctgaacagcttcggtatggaaaaggaaccgatttatgcgacaatccctattctcactgaagccacgaacaactacgacgatatgcaggatcctcaatcttcccaggtgagctgaccgagagattgatcgttttcttatgtcgttttaaagttgctcgcctgatgtcaaagatacagcaggagcaacaacatcaaccggcggaatactcatctcagagtggcatcaatagctcttggagggatttgccagacttcaacgacccaagctgggcgtggctcaacaggtgatgacgatgtaccttggcgacgtgtctatgtagcagccagatgaaacgtgttgactttcggatgcgcttggcggctccgtccggatccaaatctcttcccatttttgcgcttttatttggttccgaaactggtccgcgcacttttcgtcagagtccaccgaaacaagaaatccagtgagtgatgatgatgatgatgatgatgatgttggtggtggtgctggtgttattgttgacgacgactgtatcgactctctcgtcatctacgtcacatagacatcccttacatcgctctacttagctacccaaaactccaaacgaaaagctcgcaatcatgggtacctcctggagagatgacgagcacatgaaggatcttggagctgatcaaacctacccgatgacgttcaatagcacccaagaagaagggacagaagatggacctctcgtccttcttggccgataccggtgagtattgtctcggatggtgtgtgttctcgctcgacgtccccggctcgagccgttcgagcaagtggggcagggatgacgttcgagcgagaaccacatcgggtacgagaggtcgtatgactaatatatcccggctcgtctcgacatctttttcccgtttgacacagctaccggtaactgggccgacgagatggaggacattcctatcgcacgcaagttcctgcatcctcagtcttccccgatcgacctctattctaacctagtcccgccgacgcgctccacatcccacagccaccgtcaaagaccccaacgcgctcaaacgcggtgatcctggctactttgactcgatccccgaccgatcttcttcccgtttcccctccggtccaggaggtgcgggtgggtacggaagggatgcacagggacaaggaagggaagagttgcccttgcctaccaggccgccgttcacggcgtttgtcggaaacttggctttcgagacgatcgaggacgatttgcagggatactttgaggggctggaggtaggtccttgtcgatgtctttccttgccccccaggttttgagcgatggttgctaacgccatccacgaaccttatcatgctatttcctctcttcaacctgaccggccatacgacagaccgtctctaccaagatcatcaagggtcacgatgacaagcctaaaggattcggttacgtcgagttcactaccctggatgggttgaaggaggcactcgagaggaccggtgggcagatgcagggaaggaccgtacgggtcagcgtggccgagcctcgtgagtcgatctgggattcgcttcgaagtgcccacagaaagaacaggcgagctgaaacgatgctgcctgacgcacttgacgtctcacagccaagtcgggtggattcggtggtgggttcggtggagcctcgatggccgagtctgccgaccaatggcgacgatccggtccccttcctccccgatcgcctacgacgagccgggccaccccttcccggacttattcttccaacaggttcgaaggcgactctgctggacccgctgccaaccctgtcgatcgagattggggtgcggccaggggcagcaagttcacctcgaatgctgacgctcctgcacccgctcgacgagaatccggtttcagcgggttgggcgagcgcggcggtggcgctcctcagaggacggaaggagcattcggaggtgcacagggtggtgggttccgggataggacctctgccggaggtgctttcgaaccgcgtggagatcgacctcctcccttggcggagaccccagacgattggaggtcgaaccgtcctccccgtccggccgcacctcctgccacgtcgaatttcacccccgccccgacggctcctgtgacgctcggtagggaagcttcccatgggcccaagtcgaggggcgggttcatggacagggaacccgtcctccttaccggtcaagccgccgaggagactgtgagtcggcgctacgtgaaggagtagaaacaggatccagcgctgatccatgatggtgtgttgatgtgtttgttccctttcgatagtggacgagaggaagcaagttcaccgccaacgaacctcctgcgcctcgacccgaggccgtcaggaaggaatctgcgcccgctccggctcctcgagccgagttggagcagaacaactggcgatctagcaaacccgctagcaaggagcctactcgtgagacttgttcaggatcatagtcgacttgaatggcggtgctaacgcagatatcgccccccagctacttcatcggctcaggcttcaccccacccggctcgtgcccagcctcgagtcacctcgccgagtgttgaatcggaagccaaaccgagcaaaatcggatcggattggcgatcggccaggcctgaaagaaaggtcgaggataagcccaatgcggccaagcccgtcgagggtgaggctcccgcgcgtggacagccccctatgaaccgtggaggtttggccgctgctggtggcaacttcccccgcaacatgcctaaccgacgaggaggccacgctggtgccgctgctggtggcaacgccgagggtggatggcgacgaggaccttccgccgcggctcccgctgctgctgccgccggcggttcttctcctgccgctgccactgccccggctcagcccaagcagaaggctcctgtcgagcccgtcgtcgatgaggacgggttcactgtcgcttccggttctgccgctcgacgacaaggagcgcaacaggctgccaagctgtccgagaacaagaacgagaacagcaacgagaaccgaaacaagttttcctttgccgctgccaagggaatggacgactttgtccagggtgctggggatgacgagaccgaggccgtcaccaagggggtaagcgagaccaagatctaagtgtcgacgatgagaggatggagaaaccaagcgatagtgcaagagaccacgcacgaatgacacgagaagaaaaagaacagggcgaaggatacgacatcgtcgcaaatgtatattgaaaacccctcccgttccaccaaccagggaagcctttctggccacaaccacatgatgacgtttctccacgacgaatcctttctcttttcgatctaccgcggtgtcgagccgcttccgccaagactcgccagacaccatttgtactatatcgtccggtactgtctcttctccctacatgcgtcatcgccgggtactcgcataatatcgtacggaataggataccactttttcatacaatatctatgcttttcagcgtccttgattcggtggctgtgtcggcagccaagtgtttgcaggatcgaggggatgcgaccgccgacgcaatcctcgtgaccgataagccatcgccaacgtttatcatctgacttgacagatgaaaggatagtgggtatcccgggcaaagcccgcggaacgcttctcgagacagcaggctccccagactcgcgacatttcgcgctacgtgatgtgtcgcttcctttcatgcgaccatcgctactcgcctgtagggcgaccgagtagctcgagctcgatatatatcaaggggggagaagcaacatggaatcggacggggaatgtacagaagccgcaacctacgttttcgcctgctatctgttccctgcgcacatcgataaataaccctcgacctcgggctccagatacaattcacttgaagtacagcactccattcgggtgtctcgtcaccgcgaatcgaaatcgcatgggttgaagcatcttggtctttgcccaccagctagcctcccgattcccccaccaagtaccccagaccaaccgccatgtttcgccagctccaccacgctccggaagacctcatgcgaaagccgctcaagaagagtggcgatcggcccaagtttgtcgcccgtatcgacagtcatgcgagacaaaacaaggacaaagacccgctcaagagcaagcacttttgccatctcgcagacattccgccatcgcctccggttgagcttgcaggggagatgcacgccctacagctctctccgacgcctcagatccagtctcccgagactcgtccgagcctctcgaacaggccaagaccacccaagctcctcgttcatcgcaactcgaatgcgtccaacacgtcgtccaggtcgtccaatggatcttcaccgttgtcgcaagctcacgtctctcagccggtctgcccacccttgacgcctgatcagacctcgtcgccccgtacgatgtacttgagtaccgagtctccgccacctctgactccagaatcgtgtccgtccccactgccacctcaacttcaggcctaccccaaggaagttgcgccggtaggtccgctttcgaagaaccacttgaggcaacttgttgaggggagtgaagtccggcagaagaagaggaagtgaaaggaggccgtcaccaatccgtcaatcattcatgcattatccatacaataggattgcggcatccgggtattgttgttcgttctctcgttaccgtcgccatattcagatcgtacctgtcgtcacttctataatgttctactggtgtaatagtgtcatgtcgtagataccgcctgcttttgctgccgagctttgagcaatctctctcgaagcatggcggtcctgtcttgcgcggtctgctccatctgggtggcctgaacagcaggcgcaatctgagtaattgccggaattggtacgggttgctgttgccgcttcttttcttgtagcagacgcatccgaagtttggccttggccctggctctagcttcagcctcgatggcgtccgcggtcggtgtcaggtcctctgtcaggtcgggcgacgccggagctggttgagcgtagaccgcagctccttctgactcaggcgcatctgaagcgtagctctcgtcgtcgcggtagtggacttcgggcgatgctccacgtggtcgttgtcgagactgcatcttggcccgaaccaattttgcgagcagctgttccttcttttcagcgcgcctcttggcgttgtcgatgatcgcttgtctcgcttgactagtcgcagcatcctggcgtggcgtaggcatggtcacggaaggcttacttgctacttcggaagcgatgtatttgtccttcttctcggccaagagatctaggtcgattgcgtcctcggtaccccatacttgagcatcgagtatggcttcctcttcttcgcttagattgtcatcatgagtcggggctcgatgagtctcgaccgggacgggctcatcgatagccgagcccgtcccgaaaattcgcaacgccacggcctgtcggaccgattcaaccgtaacgacgggtactttatcgatcccattcatggtgtttcgctcatcggcatcacctggttctccccatccccgcatgccgcggtgcattacatcagcattgtttgcctggttgctgcgatcatctcctgcagccagcaggtcgtccatccgtgcagcaacccgcttcgaccgtgtcggcgctctgacagagcgcgccaatggctcctccgcttcgacctctttcaacatttcctcgtctacccacgagtccgcctggtcccatctacgatcaagcttggaaggtggcgccacccagctgtctgtctggtcccattgacggggagacgaaggcgagggtttgcgttgtctgtcagctggacgacgatccctgactgcggccgaggagagggacttcaagtcatcatctgaggagagtgacatcgaccgtcctcttcggataggggatatcgctccgtttttggccagcttgtcccgggccagattttcgacctgcctgagatcagtctcgtccagcaagacgtctccagcaaatttatccctctcatcaatcgttatcgatccctgtcgctcacgactcggtccggctcgcatccgctgcgtaaagaagtcgtcgtcgtcttcatcctcaagaggtcccggtcctaagggatcgtactgtaggacttcaagctcagcaagaccttgtgcggttccgtctaaccgttccacttacctgaacgacggcatcgtagaccgccaaatcccgatacggacttctcaaaaaggccacgaattctgctcggccaagaaagatcaactactagtccccgtaatcagccgcactagaatccgactgaccatgcacgaaatgttccgttgcctgccgctctctcccttcgctaccgcggaagtccaagaaatcgctcagaagccttacagcgggttctgaccggatgtcgattgacctcattagagagatgatgtacgtcgtcaaaaactgcgagtcaaaagggcaacctgtcagcctctaacaaaacctgaagcccactgaattctcggaaactcacttcgacatcgagatcccgccagactcgcaactctcgcctcagccataacgtagctctctatcgtccaggattgagcaggtcaggatcgtaaccagagtcgagtcaagctcgggacatactgtggtatattccggattatccgcaaactgtcgaggggtaggtaacggcctgtacctcgtatgcacgttacttcctaagtgctgtatcgagtgtacaagcggttcagtatcccatagccttgacctgcagcctcaacaggttgtgcgtaccttggcgaacctcctcattcggtagacatccctcctcacagcaacctgtctctccagaacttcttcgccctctggatcttcccccctgacgcgcgtcctagcccagagatcccgttcgggatagaggacatcgggtcctcttctcctgaatggaggtactggccgtcgatgaggtagagacgaagcgaaggtggtcgaaggtgggttgttagggtttattgtcggtaggggagggaggtagaactgtttaggccggtgaagtacgtctgtcagtcgacatgagggtatatcatgtagatgactttttgctcaccttgaccggtcctgttcggcgttcgagatcgtgtagcaagtattccctcatcggagctgtacataggggacatttccgagattggttcgaccagacattgatgcagtcgaactgcgcgcacggaagtcgcagcggtatgttgcgtaggtcatgaatgatgggcggagatgactatttggagacgggacttttcggatgcccgcacacggaacccaaaactcacgcaaaagatcgaatgatcacaatcccccacgatcgtccgatcctggactgcttgcagacagatcacacacatctcccccgcttcgccctcgtcatcctcgtcacccgggacttcagtcccgagcttgtccaaagcgatctccccggtcaaattcgaagggtgccattgtgaaccgttgttccggctgggaaccaccgggcgagaagcttcgagctgtgcttgacgagctgattgacggcgctcagtccagacgcgatgttcccctggggacgggatccgtcgtcgagactcatccacctcttcgtcatctaccgcgtcttcatcgtatcttgataactgacccgtagcttctctaggggaagacgatgacgcgaattcatcccctcgtctgacgacttctccactccgtcgcgatttggaaagacgtctgcttttcaagctcagactcggtgggaccaggtcggtgggcggttcgcgtttgccgtgagttgatgggccggcgatcgatggtgcctgtgcgagcaggaaggcttccgccgggtcctgagggaatagcgacatgttgtaacctagcttagtctatcgaacatcgatagactactgcactatctctacgttgttgcaatggaaatgtaatttggcttgggcaaggtacaagaccatactctcatcttgacatcgcatagattgatggtaatcactcatcggctaggagcgatgtcgttgcaaaacatttcacgtgataaacctcgcctcggcctcgtccacctaaactagacgtagagtactagagtatatcatggtcgccataatatctttctacgacacactgagattaatgcatgtagagagccagccaatcgaaaattctctacagcgtcgagacgcgtagtcttacaaacccctgattgcttcaagtaccgtagtggtccgttaccaaggtgatatcacatctgggcggacgatccatctctacaaaagcgactggcctaatatgagcagcagatcctgtcgctgcaaggctcttttgtatttgcgggatattaagaaggcgatgagcataacaccttccccgggtggagctgttagattgctgtaactttgggacgtcgttgcggttgcccgcgactgaaactgatacatgaactcgaatgccgaattatcgcgcgaaatgccaagcagttcccaaatcccgtctatttcgtaataaggcatctataatgatacgaccgttcgttagggctagggctcttctgtgagttaaccaagcatgttcatctgctaccccgttgtatatagacgtttgttcatagcttgaattcgcattgcgtcccattgttgaccagttcgtagtcgtctaggcaggacaagactattcataacaagatacccggtatgtatcagctttcaggcgtacgtctgagggaatgtcaacaagagctcgacttaccttgacatttgccttccacgcacgaagcctcatcgacaccttgtatcccgctgcaatcgaccgctccttgtccaacgcatcctccacagctttcgaggttcgacatgacatctacgcattcccataaaccctgtcgtccgcccactgcacaggtagccatccccttcaattcgcagtcgaggtcgggaatgatgttccctgcgtcgatgtctagccggcgtcgacgggctttcggcgaagcaccggcatcggcaggtgctaccacgatggaaaaggccggggatagcttgcttcggtaattatacttggcggtcctaagtgacagctcgatctgatctacgcggtcggaatatcgttcggtaggatgagcataaggtgattcgcaactgaatctgatctgatctgcgccgatgtaactcacattgacccgtctgcagttgccctacgggtgatcgaccgcaaaccgtcgagatcgaagacgtcttgctcgaaagcgtcgagctgaagatgcacgagacacgtcagcgcccgggtccttttcttcaagccctggaatcttggttcgtggactgacgaagcgcagatggaggtaaacctgttgttgggtgggaccagagccggttcgaagccgaatcccgagcaggctgatgccgtcaagcgaggcgtcgttccacgatatcaatttaaatttcgacgataccatcggtccgctcaacctcagaagcttactcaccgacggggtcataactcaacttgaacgtgtacagctgtgtactcccggtgatgaacctttgttccgatgtaggaaccgtcaaggaggcgaagcacgtttccaaccgagggatctcggacgtgatatagatgtctcttccgagaacttgggtgacgctctgactagggtcggttctgttctctatgttgagagtcattgaatctgcgggaggatcttcttgagagcaagtcctagccggaagaggcgtttcacgcgctcaggcttacacgtcctgtcctccaaccaaaacgctcgactcgccccgcaagcaacgtcatagatgctcctcgaagagtattccacatcttctagtgccgggtccactccgcttgaacacgcgatgtttccaggctggagcgtccacgtgtatcctagtcgctgacacagggcgacgtcgttctccacgggaatgtaagcgtactcttgattgagtcgttcggtggtgatcagggggttcgatttggagctccaattcttgactatgtaggtattgatgcattcgttgacgtcggctgcgttggcgatggctgctgccacgctggcgaggatgagcaaggttgtggagcgcaacatattgtgctggacagagatctaggcccgtttgaaaacaggtatgacttggccaggtaacgtgggcttctccgaccgtgttcgcgggaaacagacctcaagtccagcatatataaacgatccaagatagacgtccgaccgcttgtttacagcgatatgaggatccggtgggaataggcaccaccattctcttccgccgtttcaaagtttcacgcgacgattcggttgaaagacgccacccccttgagcctctcgctttcgacatggctacggcggcatgctctcgacttcgggccggtatccataccgggcccgtaccatagagttcacacaggaacgacaaggcggtgaaccttcttgtcctttcgttaaaaggttgttgaaggctttagtaagctaatagcagagcggccaggagaatccggttccgaaaaagtggttggggctcttccggtggattcgtgctgtcacgccgtaacctccaaatcgcataaaaccacttgtcgttgatgcgttttgatcgatgttgacaatgtggaatattaacttccgaatcagaattaattgcatccggaatcacatcatctgcgacattgatcttgctttgttcgagttgtgcgttttcacaggcgactatggggcaactgatcgtatccctgcaaagtccacaactagataggagaccaacaggcttgaatctttctactacataaccgacggatatgaggatccatctcacgaccgagatatgaagccgagggcagccgaggagagccgaatcaacgtcttcgaggttctgatgatctgatgaccaaaaactactcggcggggcctcaatacgtgattgcgttgatctcggcgtggagcttcactctatcacttgcgcatcgcagtttggtactactgaaaaggaaaaaagaactttaggctgaggactagccggactaggtacaagacaccatatggatcaaacgccaaatccacccaagacgacgacgacgacgacgacgacgacaaagacgagcctggacgacaagcaacgacgatcaaataccatcacaaacgaacgagatccatcgacgacaaccacgacaacaaaaggttcaacggatcaatatccacccggatacccggagctgagcttaccggatacaccatcacacgtacgttcctcgtcagccaagacaccttacctttcctacatcatatgtatcatactgatgtaacgagacgtcctgtccatctcgaaacgctcacttgtttaatggctctgacattcttcatcgactcgtttcttgtcgagggcgatcaattctacactgcaccgaatcaaacactgaattgaccacatggactccgacatcatggacagcttggtcgccgttttacagcgggacatgcacatcggcatgggagccggtataggtccacactcctttggtcgacctaccttcaataacaaggatgacaatttccacttcaaggtcgctggtttcagtatggggtcgatggcgccgaaagcagatgcgtattacgaggtaggtctggtgccggttggtcgatcacggccgcagcttagctcggcggatctttatcaactaggccttttcctaccctaccatagagcacgagtctcatatatccttccattcgagaactgcgcggttctcgttcgatatcgcaccggtatctaagaacgaaacgtcacgacttccacgaccggcatcaaatccaacgtttcccttcgatattgcgccaccggggacccgcccactcaagggagaaatcgcacttgaagacgtctctactcgggggattagctgtttcagagcggaacagcccatcaccgtaccgtgtcttcctcatcgacgaggctcgtactctgtatcttcatcgaggtcaccccagacgggaccgaccaaccgcggatggaacggcaggcaagtgtccccgttctccgtcgactcgtcctcttcctcggaatacggttctcctccacccaaacgatcccgcttcaactcgcccgcaacgtcatactctccacattccgagtctccctacggggccaactcgatggagtgcttgaacaaggtcacgttcacgattaccatgcgtcgacctccccggttgttcgttcccctttcgtatcagagcgggaagaaattcgtcgtcgataatagcgaggcgggaagaaataagaaggacattacgactcgacaagggaccgcttcagactttgtgaatctgatcgacggggctgagaagcgaagggagaaggatgttggaccgattcccgtgttgtcggagcaagaaatattcaaggcgagttgcgcggtgatacgaccgacatcatttatggcgacagttgatcagacaatgcttctaaataggtcggcgaatacctgtcctaccgtttcactttgctcatgtcggcagatgagcacagcaaacttcgcaagctcctcggagacctaggaattttgacgaaagacgtcctctcgttgcagggtatcaacgaattcaatgcgtcgcgcattcacacccacggtatcaatcatggtgcaaatgggacccgagtcgatgtcgtcccgattatcagcattcggccggaatacgctcagaggaaaaagttgggcacacctctcccgtttccggggaaagacctgcttgtcactctgctgccgaacgttctaaggaagctcgcgtttccgacccgcttcttggcggaaggattgatctctcacggtatcattctcccgttcgatgcgatctccctcgtcctcaatttaaacgagttcattcccctagatgacagggctaggttgggcaaagtcatcgggacgcctgcttgggcttatgagggtccgatgcagcatgaaccccagctattgagagaaagagtgctggctagcctcttcgtggaagatcgaatcaaggatctcggtccgatcatcaaacgtgagcccgctcgacgggttgagacgcattggcaaacacgaaatgactgatctgcttcttttcgagcagggagagccaaggcgttggcaaggaatggaaaccctccagagatgccggctcacctatgcaaggtttatcgctgcgtgatcacgcctaccaggattctactatttccctctgagcaagaagtcagcaacactatcctgcgaagacaccgtgatcaaagcgatcgcttcttgcgggtatcgttcaccgatgaggacgacaggatcaaggtctttcaaagaatctggtcttgggtgtctttacgttgctgaactttggtcccgacagatgaaccctatcgtcagaaccgtggatgcagccaatgacagtgtcggcactgttgcccgtgtccgtcgtgctcttttccaagggcttttcatctctggtcggcattacaggtttctcggccatggtacctcacaagctaggtaggtcaatccatcgataccggccaaatgatgatccaatcactaatatgcatcgtagagagcacggatgttggttcgttgcagagagtccggacggccccaggccattgtacgctgaacagattaggcgcgaaatgggagatattaaggaaaggtatgatggttcctttgggtagcaaaactgctcacgaccgtctgactgacgatatatctcttagagttgttgctaaatacgcaggtaagcgttgcttcgtttggcctgtgacgcgcttgagcctgatgatgatctgtccatactgcagcgcgactcggcctggtcagtcaaagcgtggacaggaagacggcttgtaatgggctgacatcctaggtttcgatcaaaaataacaggctttcagcactactcgtgaggtcaagaacgccaagagggggaatatcacattcgaggtcgcgcagaaaacgccagatgtcaagcgcggtaatttgtgcgtgggctcgctcgcaagtcgtgatacttggactaccagagctgattcatcgctccagtacttttaccgatggagctggtctatgctccgccagtgtcgctcgtgacgcagctcgcagtctcggctactattcaggtccggactctgagccgtccacgattcaagtcagaatcggcggtgccaagggtgttctcacagtatggccatggatggtcggttatcaatatagcttgaggcagtccatggagaaattcacttcaacagacaaaggtgtcaacgtcatccgggtaagtgattctcgctcacgtagttcattgggtatcagatctgaacgataccggctgcgttagatctctcgattctcatatgcatttctcaaccggcaattcatcgtgctgatgaatgagctcggagtgcctgacaaagtgttcgttgacctcttcaacgaagccgtaggagaggtgaaaggaatggctgcgagaattgccaaaggacactacaatgcaggagatgtgaaacgcggcgatgagctgtcgacattcccggtgcggactatggtgaaatttggatttcaacgcgatgcatgtttgcaggacctgctcaaagtgatcgagtgccgctctttaaccgatcttcgttggagggcccgcctcgagatcaaacagggtgtctatcttctaggtattccagacgagttggaggtactcaaagagggagaagtcttctgccgatatcagaacccggacgaccctgatgaggaagcgaaaatcgttaccggcttgtgcattatctgccgagcgcccgcgttacacccgggagatattcgccgcgttaaagcagtgaatcgaccacaacttcaccacctaaggaacgtgatcgtcttcagcgtcaaaggagaacgagacctaccaaacatgctcgggggtggtgatttagatggtaatgctcctcgaagccgattcacaggcatgtcgtcgagctaattgttccggccgaccacctttcaggcgatgattatagcctgatctgggatccccgtctcatacacaagtacgatactccacctatgagttataacgcccccgaaccgattgcagtcgacaaagtcaccgaagaggatctcaagaacaacttcgttgactatttgaaggtacgaagcttgttgctgaacgagagcaatccgaagtagcgtcgctcatgaatgttgtattgtccttgcctacgatagaacgatgtgagggggatgacatactgcctctgtcaagccctaaaaataccttttgcagattctaggccaagtcgataatgcccatatggcttgggcagctcatcagcttcatggaccgcgaggtcacaactgcctcgaactcgcggagatccacagcaaggcgtgagtcgtaaagagatctatctttccttgtgcactttcattgagccgtgggtgctttcatagagtggacttcgctaagagtgagccatgaaatgtccgcgtctgtcaccgaaaattgtgctgatcggacacctgaaatgttagctggcgtcccggctagtatgaaccaaggtctgcgacccggaacctggcccgactttatgggtaaagggcctcatatgtcataccagtgcgacaatatcttgggacagctttaccgcattgtgagcccgatcgatttttcgagatcgcatcgatggtgagattgaaggcaacgtggtagatcaaccaggacccgcgctttgatcccgctagcgagcaagacattgctctgggtgtagatgcgcgattatgtcgcctggtaatcccgactgcattcctcaaccacgctgcggaaatgaagcagcagtatgatctgcttttgtgggacgtgttgttgaggtgagcaacatgctccaaattatcggaacatgagctgaacatgctcttgatcgcagataccgcatcaccgaggccgaagcctattctggcctggttctcaagaatggtaagcggcgtaaaatgaaagatcatgacctcaaggtaagttcccgatcgacatagttgaccaacaatacgtatcgagatcaaccgtaacctgttatcaaggatccggttcgcgaggcatttcaagagatcgtccgtgggttgcgagaagaaggtgccaaccggatcgagaagcaagaatcgtcgcagaccctaacagtcacgcagttgctggctgtcgcctgctaccaggtcacgtgcgacccaaggtacaggagcttgaccatggacgtcgatgaagacgatgagggttctgaagggggagatgacgacgttgttttgctcgacccggactggcaaagctcggtcacgcgccccaggtgagtcggacccgcattggatcgatagacgctacgccagacagctaacgcgggagattcggcaattcacagacaactgatcagtttcgcctggttgtacggtaaagagattttggctcttccgatcatcacgggtcacgctgttgaagtcgaggattgatacgaaaggcccttaaggacgctaggtttgtgattattccgagtgctctgtttcgatactgtggatatatggatactttctcccaaatccaaaagatgtgtatagagcgtcgcatgaccgcttctcatttcgacggcttctcgtacaatgtcgctgcctctcctctctaccctttcacaacgttcccgaatccatcaaggccaagaccttgtgtctggacgtcttcttgagaccgtctctgaagaggtcgaatagttgccttcttgtcaaaccgctctgcaacgaggccgggaaccgatcagcttgtacagatctcttcgccgttcgctctattgctcgtatactgactgaccttggcggagacgatctcgacgttcgggcctggatcgcaaagccgaaaagcgcttccaaagccaacctctttccgcggtggaactcggcaggaggtaatttcgagggtgacttgttttgggtgacaggaggtttgctgggggactttttcttgggtggggtggtagatcccgattcgatgtgaggtttgacatcgcttgagaagtccatgatggatgagggcggtaagaatccccaattggcggaattttgagttttggttgggtcagatttgacgcttcccggatgaacttatctgcgggagggacgggcgagctttatatgaaaccttgaaagaggaggcgattcggtgaacagcttctcaactccgagccacatttggtccaaccgaaccttggctgatttgcgaagtcccgatcgatctgaacaaggaacaacaatatggtcgatccccattttttcacaaaggatacctttcgatcttttcgagatttgcttccgtctgtttcatgacgatcgtccggcgacaacaaaacaagagtctgtctgctcgtatgctcaacaaatggtggcatctcgctcgttgcggtcatgcgaaagaaacaagaacctggttatatacttgaatcgttctctacgcatcgtaccggtgcttcgcaagatatacgcgccgttcttgagcatatccaccgctcgcggaactcgtatagtctcagaagatgtcatcgtaggtccagaaacagcaacaacaaaatctcatgtactcgtactgatacgtaccccgatacagcccgacctcggaaaccaaacccatgatcccgactgaagaaacgcctcgcacgcccaaaaagtctccgagcaagaagaagactgcgggctctacttcggtcaagggcgaggttgtcggttcgcccagtaaagaacacataaaggaaatgagaaggtcgcgctcgaaactctgtttgaatatggggtgcgaggagagaccatgaacaacatcgccgtcaaggtaagtaaagaaacctatttttcaaaccggcgagacatgcctctatcactgacgtgtctggattggccagagcgtactgagcaagcaacaggtgggggatctgttcagggtaaagaggttggggaatatccggtacaaagtgatggctttggtagaatcaggtagtatatgattctttcttagctggggcttccagcatctcggtctgtatggtatatcattatgcttgctcatcctacgttgactcgcttaggcctactctacaggcgactgtatgatacatggtattcgtaattctatgtcttgtgccaccttgtccatttttgagacggccgaagccttccaagcgagcggccgagacgggcccgagatattactgacttctattcgggtggagaagcaactcgcggacgcctcattgtcttcttcgtgagagggtcttttctggtgtgttcccagcgatcctcaatgattgccgggtacatgagataatcgacccacggccagaagcctcttattcacttcccattttagtgcgcttggacgatgctattcacatctatacgtacacaccttgacatctcgaaagtcgtttgcgcaccaagacgtcttgaacttattcacaatgcccaagtacgtgtctgtcgaatcgagttctgtgttcggctgatattgacacggcctagcccgtagagcaccgtccgtcaagcaagaagcacaagacgctacttcaccttacaagacccctccacccggccgacaagcctcttcttcggggtctccaaccaagaaagaatccccgacgaagaaggcaggtcttgctggtcctgtccccgtcgatgagacggccgccaagaagctcgcgatcatgaccatgatctttgatgcggccaagggcttgagggcggaagatattgccgcgaaagtgagctgcatttgtgtgagatgcgacgggatatgaccctcgatcgctgaaacacttggtatcggatcaaagaccggaatgacgcctctccaggtcaaaaaccttctccaggttggtagaccgtccaacctgaggtggaaggtgttggacaaggtcgctcgaggggaatgctgagaggaaaggtactagtagtttcggatgcttttgtgagaaaggatatgcttccgatctcgaagtgtagctagctagcggggtcaatgtacaagacagaagtcatgatagtctgggaaacgagtcaacggtaattgatgcaaacctatgggaaaagcaagttgagaagttgcaccctgacctatcagatatgacaagttagcctgctcgcaccattcgcgtcgaatcaccatggcctccgcgtttctcgagcccatctcggtcaacccaaaggaatacgcattcacggattcgggcaacatcatctcccgagcagccaaaatctacggaccacagaacattgtcatcaatggccgaagcgtgatcgagaggggatgtatcgtgcgtggagatcttcggcgattgatagctacgcccggtgctaccgggagctcgggaacggtccaactcgcaggatcagctacggcggtgatgtccgggaggtatctcagcgtcggtgaaggtactgttctgaggccgccaggaaaggtctacaaggggtgagtttgtcccgaggtgcatctcttcgtgtcgctgatgcttgttgtgtgcacaggaccttcaactactacccgatgaagatgggagactttgtcacgatcggtcagaactgcatcatcgaagctgctcaaatcggctcaggtactgaaatcgaggacaattgcataatcgtacgtcctcggctgtgtcccatttcttccacagtccaaatgcgcaatactgacggagcggatgttcctgattgatcgatcgtgatagggcgaattcgtcatcatcaaagactttgtgatcattgaggaaggcaccgtcctgtccccgaacaccgtctgtcctaatctgacgagatgggccggcaatcctggtcagtgaactctcggacagctcgttctgtatatacaaacgaaagactgacacgatgatcatctctcatgaatctgcaggccggctcgtcgactcgctgccggagagcacgcccgaaacggtagaggctagggtacgagccaactacaagcgctacaaggccgtcaaacctgagccaaaactcacgaccactaccagatgagacgggacgaaccccaacgatatcacaggcaaatgagggtctatcattctcggacgagaccggcggcttcaatctgcgaacatggctagagacgcgccggacgaggtttactctgtgcctccaggagcggcgtccgtgctgcgacccgcaaagcacctgtcaagccgcccgcttcaaagcaagtgtggcgaagatctgatcgtccaggccaggtttcacggaacgatgcctggatgacactcaagaggttcaagatccgcgaacacctctcatatatgcgagtccagccggtctatatagatgccatacaaaataaatgccttgtaacgatttaatgccacgaggatgaaagttctgttaatctagctcgattctaatctttgacgcccagatcaccagacctcgtcgaccttgtttcgggcgatgcagaatccctacaaaagacggggtgatcgatcagcgagcccggaattgacaagactcgcccggtactcactggcaccacccagtccttgcaaccacactgcacaccggcccagtcatagtttccgatcttggccttgcacttttggttgggacacaggatcttgcctgccatgctaccgttttccaaaaagggctccatccaggtgagctgtcggatttcagtaaaccgtgagcgtcagtcaggcgggagcgtttcgcacggcacatttgtactggatgtcgtcgcgacgtacaggctcgacaaagtaacccgaacacttggaatcgtgactcaggataggcggttccctttgagcggtgaagctggacgcgctgcctcgacgtgttatgggggccagctcgatgggtgacccggtctgctctccatcgctcgcgatcgcactctcgtcgatactcaaccgtcccatggcgttgccgttcgtgctcggggtcagggccatcatcgataatcgcttggccgcctggtttcttgtcgaaggtgacgaagcgtcgttctcggtttgtccgttctgaccgttggcgccttgtccgtgtgagaatgagtgccggggtgaaacgctgaccgaggacgacaccgagtcggcggaccgtgcgatagggacgctcggttgggagattcttcgagcggcgtttgcagctgcggtaggcgggatgacggctcgtccgggaactcctgctcgaagagcagccaattgagggggaagggatgccgcgagggcctcggcgttcaatacctttctccctgtcgaacttttgtcctcttgcacagcctgttcgtacgggtcgaccccgactccgtcggccacggtggacaatccgagcggactcgagactgtcggcgtagtcatgctcgacatgctgcccaatcggctgttcctcctcttcctctccccttcattcatcggcggcgagacgacggcggaggattccaggggaggcccgtccatcgtcgtcatcggggaaggcaagctcaagctcatcgacggcgttctcgatcgaggcaccatgggagtctgatcgaggatatggtccatcatatgttccctcgtggccaattgccttcgacacatcttgcatctgatcttcctcctcgccatacctcctgtcggggtggccggttgggagggcgtaggggtggaaggaaatttggccatgtgttccgtcgcctcgggtgcgaattctccttcgtgcatgacttccatggcggtacgctctaggtaccaacggcgggtctccttgtcctttctcgagaccctgcatcgggcgtaatggtagacctcgagctgttcccggaaagtctgcgatggtctatcggagaacaaagtagatcggacgttgctcggcaaatcagtggagagtcgacacgtccccatcgagccgtgcgggactcactcgatgacgggcctgacgctcctgatcatgtccaacgcttcgtccacgcccactcccaagaccttcatcaagtaggccgcggtgatcgtcgccgatcgactcatccccgcttgacaatgcaccaggacgccaccctttctcaagatcttcttatcttcgggcttgctcccgaacgagtctacctgtttctccccttgcatgactcccttgtcctcgtcgacctggtcttgagcgtcacgctgtacgttctcttccctctcttccttcaagaccgagtctatccattcgacgcattgatccaagtgggagaggatatccgtgttgggtgaatcctcgatggtgatcgagaggtgtttgatcgagctcgggatgttggtcatcgcagggatgatcagggacaagacggcggtctacgagccagaggaagtcgtttcggtgaagcggatccgatcgtcagtctctggaggtagagccgctggacagggaacggggaaactcacaatcccagcctctttcaagctcttttcatcctgcgccgcatagacgtctcctatccagagtccttcctcgagtacgagctgcatatgacccaactcttcctgttcctgtaatcttaccccttggtcgcccacctcctgagctgtcttgctagtctgcatatctctgctcagctggatcgctgcctgttcttctgcccgttgtagggcttcaggggattcgagcgtcgagtccgatgcgagctcgtcggggagcttgttcaagagcgatcgagctcgttcgaacggcggggcttgagcgtgatccgatgtggtgaacggcatggctgctgaccatatgaatccggatgtcgacgcaagaatttgacgacgtcgacctttaccaagacgactagggttttgcggggtttcgctgttttgcggggtaaaagagggaaaagaggtcccgaggtatgatcgtttcggagactaggtcgtggatggaatggtctctctttctgtgagatctcctgacatgtaaatgacggcctattcaggtgtatcttgtgagctgtgtgtatgtgacctaccctacgataagatgattgtaaaaatgtcggaaatctcacgccgcaaggtcccgatcggttggtcgccccgccccgaggacatcaacaattcgcaacaaacacgtgggcgaacctatatggtctatggccctatgacatcgtttgcgagaaccaaacccgaccacagacctccatgccaatcaaggtagactgaccaaacccgacacatcctgaacttgccaacacgaggcgatcctccggaaaaccgcacggaagattcccctttcattcgccgaaagcatcgatccttatctcgtctacacgtaaactacgcccttctcgaccggccttgcctaaccctccctgtctatgcctcgatcttctcctctttgcctccctcccacctcacactcacgctcccatcctcatttccaaagtaagcggccttggccatcccacagaagagcccgacctcgaccaccccagtcatcagcttgatcttggtcaagagctgtaatcccaatttcgttccaatcagcaacacggctcgcacaaagattcaaacgactaatccctccgagatgacaaagctgtactcaccgctttgggatccttcatcatttccctggggaaaggcgcatcgacgatgaagttcccgttatcgctgacgaccggtcctgcctttgccttgcccatcctcagggtcaagatcttgccacccgagacgtttgcgtccgagctcgtcggggaacccatacgggagaggtcgtacatgaccttagcgtaggcaaagggggccacctcgatcgggatcccctgggtccactgggtgatgacgaccatgccgatcgagagtcgagagtcgagagtcaaagtcaaagtcggtcgagagaggagacgtacggtcagctcccctggtgttaattcttgatttccaccccgatgatcatcctgcttgaactcacgctctctccgagtacggtcccgttcttgcggtaatcagcgaccatgacccacgtctcggcggcttccgccaagaccttttcccgaagttgacaagctccacctcccttgatcgcgttcaggtccgagtcgaccctgtcaaaccaccgcaggatccgggtcgacgtcgagggggtagagatgaaatgtcggaggagacatcagcgtcccttctccctcccgcgcccattcaccgctactttgcgacgtgtgttctgactcactcatcagccccgtcgatggtgacgtccaacctgacgtgctgatccacatcacccagagtcaatccggcttggatgatgagttctttactctggaatcctggtcgtctcgaaccggaccgaatcgagatggatcggagaatttggtcgacggatgtcgttcagaataaaagcgtgacctcggggattagtatcggtgtgctcagactcgctcgtcccggtacgttggacgactcaccggtaggcagaaagatcctatccttgttgagctcggatccttgggattggatacgctcgacaacgtagggtacggtcgagcccgagccgattccgatgatctgatgagagaacgtatagatccgggccgggggagtcatttttcggaagagggcgagaacgtggatagattgaaccagctcgtcagcgagtggaatccacgaacacgttcgcgttcatgttcacgcccaggactggctggccgcgtcgtcgtaccttgcaatccttgcccacgaactgatccaccgcggcgaaagctgccaaccgtttagctttttccacaggttgaagttcctctacccttccggcgttgagaacttggtcgacaatcgtcttgttggtggttgaggcggacatggtataggttcggatgggggggcgtaggaaaggcctgagagcgtgggcgaggagacgtatggtgtcgggtcttataagagacgaataaacgaccaatagcgttgtgagaggctttatttggtcttgctttgctaatgattgatgtagtgatgccgataatgatataggttgttgtccaagttgacgaccttgtagcaacatcagctacctacctcccaagtctcaccccggattgccggtccgttttatgcgttttcaagtagtttcgcgctgattcaccggtacaatcatgttcatgttatgcgttttcaatttctgaaaaacatggcgacacgtcatccttcctctaagggtgatggatggatgcagctcggccaggaggatacgatgagctaggctgatccttcgcacgtcacttggttctgaaacacgcagacgggattccggtcattcgaagcgaatccaggtagagcttcgggggcggaaatcgagtggctcagttgttccgatcaagcgtcttattagggtcacaattgactacgagctggtgcgacccgaatcatgaggcattgatccttaagcaaacgtaccgcagctatcttgttatgaagctgtttcctaatcatgacacaaccgtacgaaacgcattcgcggcgggacccagtcggttgactacctttgtcccgttagtctgcaaagagcgtcggacacggagtacccaggattacatgaactgccaatcaaggaacatgaccgttcccaccccgatccggtcgttttcgtggacgaactcgatgcaaaacatcgctcgtccgatcccccgctttacgtcagaacaggctcttccgggatcgtccccatgttcttttttccgttcccacaaagaacctccctagcgatcatgaatctcagcccgcgatatatacctgggagaccctggctgcccgattcgaaagggcccgactagagcctggtcgatgatcttgatatccattcgcctcgtatacttttgcatccctccgagtctagcagatgcagatgcagatgttaaagacaaaatacaataatgaattgataaagcactggaaccgccgacgctgacgccgacacggatgtcaatctcaatgcctataatccattgattgaaaagtcccgtcccacgtctcgccgcccaatgatgaggtcgggtcgggtctatggatctatagacgccttcccgggcggtgtacgacggttaacaagaggacggatttactcccgcggggttgggggaaggattgataccgacctttcgcctggcgaatctcgttcaagtcctcgaggcggtctggtatatggtatggatatgtactagtttgcatgaaacgatctactaacgaccggcccaccagctctgactccgagcttcggccagggttcgttcggacaagtcgtgtgttgcgacatgtccgtggttcctagtcgaaaaggggaaagagggtggaatagcatggcttacgtcggtatggtgtgtcacggtgggtgagtcgccccttccccccagcggctggcgtaaaattcattccgtgactttacgttacctgggaggattgatctagcgcccggcccgcccactcgatcgcgtggcgtaggcaagggggtggggggcaggcgcaggggaagcgacaggcacggatgcagggagagagagagcgagagagtggatcaacatacattcactactcttttgatccatcacgaccgacatgtatcatgatcatttgatccattcgcattccatcaccagactcgagtcgtgtcagacacccgtcgattcgtgagtaacaacatcccaagagtatagtaacaggtcgtcctcaccttcgtcagaccccgacgaacctaagctcgagctctagacggggacattggaatcggcgaacgcgaccctgatcaaaaggaggacctaccgtcacttcctcctcaaagcatcaaagcatcacgagatcgcacgaccgtgagagatacatagatccacttttctacaaagtcggagagaggatcacacatcacctcgacatcgatcatcatcgacgactcaaccgcatctcgcagctctcacttgctcgcattgctcgagagagagacagatctcgacggctcgacaatcaaaacaacctcgtccccctttcccacgagcttcaactcgattcgacctgttcagcctagctacgagctcgcagcgagacgacgaaccatcgacgatcagagttgaaagggtcccttttaccccctgggtgaccacaaaggaactcgtctctggcaggggttaaaaggagaacggacatcgacctcgacgtcggtcccggacgtccaacttcagatcctttcgatcgttgtccctagcgttcatctccgggcatcctgcttttgagggacgacaaagggagatacattcatcacgccttacaccttgtcagcaaggcctcagggataacaccctggtggactcgactcgacaggaaccccgattgatatcgatcgacccacatcgtcggcagctcgagatcccggttgaaatcccccacgcctacgaaccatcaaaaatcgtccaggtcggtccgaacgggtcgaagactgtcttggaagaggaaccgtacgcagggcacgacgaaggatcaccccttcacctatctacctatcgacctgcccgagtgagacgataccaccatgtccacccagaccgttcccctcaacctctcccacccttttcccccttcaccgacgacgacccccttcccaccctcctcgccgacaaacactgtacataccgggagcgtcagtaaacgaggaggacgagcggggatgaacaggtacagcgtgaatgcggtgttcagtatggcagcggagcaggacgtcgaggtggaggatgaactcgcgaggagtgagtatgggctgggtcggcctgggtttgtcaacgagacgcgagtggcggtgctgactgtcaacgccatcaccgccgctgctgttgctgttgctacctctaccgtctccactgcctctatcgccccctccaagctcaaaaacgtctgcgggatttgaaatccaggatctcggcgcagagcaagaagaactttgtgctcgagcgggacgtccggtacttggatagcaggatcgccttgttgatccagaacaggatgggtggggaagaggtcagtatgctacgcgaagcgaggatcatagtagaggttctgggtgtgaagctgaaacgacgatggggggcatgatgatgacgacgatgggggcatggtagaagagcaagatcgccgagacgctggatgatgcggaagcggaggatattccatacccggacgagaaaaagatgaccgtgagttcgatgtcatgtccccccccacctctggtctgcccagataatcatcgctcacactccccttacctttttgatcgctcacccggacccgcattcgcagctctactcgaacttgttcttcctgctccaggcggaacctcgacacgtggcgtctctctgtcggatggtcaacctgagcgagatcgatacgttgttacagacggtcatgttcacgctctacgggaatcagtacgaaagtcgggaagaacacttgttgttgaccatgtttcaggtgagacaccaggcggccctttcgcgacgaaccgagctaagtatgggcttgggtgcaattcccagtcggtcctggcagcgcagttcgaaatggctaccgagttcggatcgttgttgcgtgcaaacacgcccgtatcccggatgatgacgacgtacactcgaagaggaccaggacagagttatctcaaggggacattgtcggaaaagatcaacagcctgatcgagcacaaggacctgaacctcgagatcaacccgttgaaagtgagaggatccgacgatgaggaagcctgatggtctcccggactgacttctgcccgtgcctcgctcaggtgtacgagcagatgatgcagcagttggatcaagagggccgtatgcctgcagacctgccacgaggtgtttcacccgagacggcagccgccaatccggacgtccaggccatcatccagcctcggctgcagatgttgatggagatcgccaacagcttcctggacacgattatcgggagcttggagatggtaccatacggaatccggtggatctgcaagcagatcaggagcttgacaagggcaagtcgtactcatcggctcttgtcatcgatcttgctgattgacccatggattcgtggattacagcggaaataccccgaagtcaccgagttcgccctatgctcgcttattggcggtttcttctttctccgattcatcaaccccgccatcgtcactcctcaagcatacatgctcgtcgaaggcgtccctgccaagaaccctcgtcggaccctcacactgatcgcaaagatgctgcagaaccttgccaacaagcctactcacagtaaagaagcatacatggctacgctcaacccattcgtcgaatcaaacaaggcgaggatgaatgggttcctgaattcgttgtgcgaggtcggcgacttttacgattcgctcgaggtaggtcagattgtggtatcagtagggcggagggcggaggacaccggtactaatgcagtcactgttcgtagctcgaccaatacatggcgctttcaaagaaggacttgcagatcagcatcactctcaacgaactctacaacacgcactccctcttgactcagcatatggatattctcgtgagtgctgccgcagcctgtctgggaaacggaatgccgagactgatcggcatactcctcagtcgcccaacgatcgacatcatctgcgggttctgttggacgagcttggtccagctcatcagcaagtacccagaaatcagaacaaggctatcgatctcgcgctatatagccgatgggagacgccgatccaggacattactaccgcgctcatggccgagaatgacctgacgcaaaacgacatcctctacatggaaaccaaggcgatctttgtccaattgatccgatcgataccccaacttgccgaccggaaacccatcaacctgcctacaatcgctgacagagcggcgacggccaaggatcccactctggtgaagaagggcctcaaggtcaaggagatgttgcgtgaattggaggaagcgatggtcgtcactatggcagacgactaccaattgatgcgagaagaggtcaccgctgaactcattcatttgggcaacatgaaggaaaaggcgctgctcgagaccaactcgctcgaagccgtataccggacgatttgcgaccacaataattacctccggtcacagctcgaacagtacaaggcgtacctgcaaaatgtacgggaagtgggggcaaaggacaacaagggcaacaccggtgtgggcgtgttgacggtgaatggcaaggagaagaagccgatcaagcagacatcgctcgggccctaccggttcacgcatgtgcaattcgagaaggagggcatcatcatggagagcaatgtgccggacaacaggtaagagtgacgtgatctcttttatacatagagccagcgtgctgatttctccttccctcgaccaatccagacggcaaaacatcttcttcatggttacttcgcctacgccgggcacctttgtcatcgccctgcacttcaaggggcgggacaaacctatcctcgagatggacctcaagatcgacgacttgttggaaaaggttggtccgggtgaggctggcgtgaatttcgctgtgactgatattgtgctcggctccgcttagcaaaaagacaacaatacggtactcgacttggaatacgtacagctcaatgtaccaaaggttctagcattgttgaacaaggtgcgtaggctggcgtctgacatgatagtcggtcgagccgtggactggctgctcattccaaactcgatcgcagctcttcaccaaacgaaagtgataccctccgacgcagtggacgttttccccttctagctttgttctcgtatacggaccgcaccgcactatgccttcgactttcgatcgggtttcccgttagactcttttctcgagccatcgcctgctggctcaggccgaccacaactcgcctgtttgtacgtctcgtttagctataatttagtgtcgccttacggatattgcacccggccacggccattacttaatgatcagacatgtacgctgatgcgaagatcgatctgcttgatcaggaactcgtacacctggctatgtcctactgtcgtgatgagggaggggtagtgttttctgtattgcgcgagagcgaatccttttcggatagccctgcgttggtcagatcgaaatggatatcgagatgggtatatgtgccgccaatgctcgtccctgtcaccggcgataggtgccgtttctgatcgatccgtattggtcggatccgcatttcggccatggcaccgaggggatcgtccgaaaaagccacctccgttatcgtcgaccccgtttcagtgggactggacaacaaggggcaaggtgaaggcggcagggggctttcgagaatcgacccacggtgtttgactgccatccctccctcaagcaattatcaaaccagagtctcgtgatcgtcggcaagctgctgcgtgagcaattaatgatcatcggcgacgttccactgaaaggcaaaaaaagggggaccttccatcggattaacttttcccagtggatatgtcttgcacaaacgcctgcctttggattgtcgcaagcaccaagcccccaggtcttgtcgttggcttgacggacgagatccggtcgaaaactgaccacaaatctcgcatgagcggtctatgctgcctggaacgatgatcgctgacgcggcgccgatgcgtgcaatcgagaggacggcagagtggatcggttgcaccccatttcttcatctgaagtttatttgttcgtaccttcaagcaattcgagaaaggaatttgcacagctacagcgctcacggaaggctttcatgctcgttcaatggaccgagctggtcgagtcatcctcctgaattgtagagtatatacatgaggccaatcggataagagtccaagctttcacgatcgtggcgatatcattcgatgttcagatcaagcaaagccatagccatcaacttcgcgggctttagccgatccaaaatagtcaaggacgccgtcagccatgttccgccttggccgtccaagacctccaaaagcccagccgccaaatatattgggagctcgatgtgcggtgagctatctatctgcttctctactcttgatccgatccgaagctcagaccagtcggaacagtgcatgggttgccctttccctcctatccgtcattccgaggtcaaccctagcctatacttgtgctctcaacacgcaatggcagagtgggggtcgatggtgtgtatccagttcagcttcgttcgcaacgtttacaaggagaaaagccatgtctgacgttctccgacatgtcacagtatccgacaatgtcgacctgtagggtttgtggaaggcccgtcaatatgcccggagggatgatctgttcccctcgcgtgagttcgcctcgctttcgacattcgagccaagtccgttgatacaacacacccgggaacggccgtttacggcagtgtcagcacttgttgcagctacagcagatgggcggaagatgagttgttgtgcatcgtccctgagggtacgggagatggatagtgggtgaaacacgcacgtatcggcaccttcccgcacgctccgactagaactcggatgctcggaacaggagtcgctagaagcatacgggcctctactcaagatcaggatggatacggaagaaacccaggtgcaaccaaaacctgccaagaatggacctttcccagccggaacgtgcgtcgccggcggatggacaatgcggacgaaaaaggcgactcggcctgtcgagccaattcacttgtggatgttgtaattatgatgccaatgtacacgcaagcatctagactccctctgctggagtgctcgtcccgctgcctccaacacctacgaacccctctgcgtatctgtcacggaaattgtggtgtccgggaagtttctgtggtgtctccggcatctcgaccggcaggaagtctggtcgagggtatgtgactttgtcagtcttttccatcgtaataagctaaggcatcggaacggtcggatacgagaggtcagcggccttgtcgatgctgagaagcgcgacacgtgactcactcgacggctccagcgaccgaaatcttgtgatgacccgctgcagaatttgatctccttcatgccttctacggtaggtacgtcgaggtcgtcccagtcctctgtaacggtaggaaggaagaagaccaaccgacctcctggtacgagcatgtatcgagcgaatagtacgagatcataaacgaggtcgatcatttcgtagggtttcgagacgggcacatagccgggcatactgtggtgtggtcagctcgaacgagttagcccttttgttttccgggaatgccctgacagacacttacagatgcgagtagctgccatctggcatcaacaccggctcgtccttctgaagcttccccgtcttttcgttacgtcctaggcgtttggctcctgctcgtacaccgtctgatagtcgcgctcctccaatcaggccagacccacgtgcgctgacaacggaataatgcacttacaaggcgggtccgttatgatcgcatcaaacaagccaccccgtctccatccgtttctcgtcacatcaaaagtgaggcaatcgagcactcgatcccgcagtccgtactttgtcgccgctctgaagattcccgggcccgatgcatctgtttcgttcaagatatatgttcagaaatttgttcagatcgccatttcgagcctgaaagacttacctttaccgcgcatctgtctgccgtcaatatcactgccaacaactaccgagccccaatgtgcgcaggtgtacaggaggcttccggtaccagcaaatggatcgtagacgaatttgcctgccgatgactacgaccgagtgctaggggatcaacatgcatattccagcgttgcgagactgttccactcaccagcgtctgtcccgccatcaacaagctcatctcgctctccatggatgtgttcccgtagaacgcccgctctttcacttcgaacttcttgactaaaagtctcgctgctccctcgcacacctatgagcaaccacgggggcagcatgtcagtcgccaggaggtcgatcaagcactgggcgtttacgtacgagtcttccaaagtatatctgccgaaggaatcccaggtttccacctcctacgaatttgcccccttcgaccggtacgatctttctcttgtcctgttcgctcgcaaaggggatgtcgatatgtgtctgtgataagcggcctgagagcatttccgcccgttcttcgtccttggggtcctcgtctacggaaggcctacagtcagcacatgggcatgagattcaatgaatcaggttcctacctacactcttcgaagtacgtgtagaggacgtccggattcgtcagccgggccggctttgtcatggccatgtaggagaacgaatcgacgatggtcctttgaggtgcacaaacccttgatcagcttgtacgatcgtttatattcaatcgattcaacgacctacttcatagccgacttggatctccgctttcctatccgctgaatatcgaaagcaaacgaatccctctcctcgttatcgatcttccataggtgagcgtcatctcgtttcgtctcctgtaggtattcgtgaagcaagggcaaggtcggtgcgtggtggaatagtcggtgaatcgatctgatgaatgatcgtattatcggccgatgagcacggtagtcgtcgctatttcgtgtcttagttcgacatggactcacttgaccaagatgcatcgattagcgagatcgcggcaatattgtaaacaccgcctttcatctcggacttctacaccttgcccatcggtgaactcgatgatgacaaaggcgctccttccggaatggacaaattcccatgtttcctgctcgagaacttggctgtccgtcgaccatggatgaaagatcttgataccgaatccatataattcggctgcagagtggaggtcggcgagacggaatgtcgggtttactagggagaggttgatggtaaatcgcggcgtggtctcgagtgtacaccggctcatgatcgtgacgagtatctggcgagtaagatccgccgagctattgaagtactggactgataacaacgagccaccgcggtggtctatgcatgtagtatcagatcagacatttcggatagatgttcaaagacgttgattaccccagcgatcactgtcacgtgatacatccgatcgcgtttagctaacctgctttacattctggctttaagggcgagctttttgtgcgagaccttcatcagaggatcaggcagcctgcacacttactcgaacttggcaaattacctggcagaccggttctatagcttcgaaatgtctggcgaggaagttcaaaagaggtaaacccggctgacaagatccctcaatcacgtgactctgatttaaggaatctaaatctcaacaatataaatttccctcgtcaaaatcggccgcaagtcaatacacatcgtagcgaagtatcgtttagatggaatggtagatggtatatattagatgtactctacgaggtcaaactgctcagaaatgttcctgagggtgcttgaacgaagtgaatgccacccctggtcacgtgatgcgtgccgaacgtggcgaatcacttacttgggcgtagtcgggtagagaaggctctttcgtcggattcgatcggaaagactgccagtactgctacttcgacacaaacgttgcactgtactttcatgaccatatggggttgaaaagaagctgtcctcgtgacggagacggtcagaaactcgattgaggctatgaattgtatccgcgtgatccgattgaggtagttcacaccctgtttgcccgtgtcaaaataccgaggctctacgttttcagtaaaggagccttgagattcagagacggtactagcggtactttcatggtattcctgggtagagatgttgaatcagaactgccagaaaccctttacgctctcagttttcgtgatcgaactggattggtgtacacgctgcgacgctgaagaaaaaacacctacagctggcttaaatttggcttgctgtgcacgttcgtcctgcttacgagcattgggatcaaactggtacacttctcctgttcaagggctactcaggacaggatctaatacgcaagatacgcccctgccaacatcatgactggtcgacaggcgcgcgtatcagtaatcgtccgtgacaccggcgcgaacggagaaggccatctctcctcacctctgctctcggtctccacctacaaaagggtactctcagtgagaatcggacagacgtatgaccactatgtatgatgatgatttgcgtatgccgccgtccatggaatgatctggactggtcccacgtaagtcgacgtaagcccgtcatcgattcagcaatacaggcgcgttgggaacgcgggctctgaactccgcaggaaaactaaacatcaccgcgatctacagggcaatgggtggtaagctcggcggggacaggcagataaaattgacgaaatcagtgattacttctctggacttaatgatcaggagaccagagtctctactcaaattctcctgatgcccaggacatgagggtgactggggtgtatctcagtaggcgatgtctgcccatccccccttcagcctttgcctttgtgttgaatcgatcctgtaagccattcccttactgtcgtcgtcgtcgcgtcatcacaatttctctcgagatagaaaggaagccctgggcacgttccgcgagtaaccgccaattctgatatcgcaggagcttctggagtgctagccctgcagcacgcgcaaatggaatcaaacccagacgagaggacggtgctgaaaggaaaggagaccggccttttcagcgggtaagattggtgtaggtttagactcgtgactcgatcagtaaattgccagtcatggagtcttagcatggtcgaaacgttttcattcgtcaaaggagacggggcttatcgtgatcgtcgctcgtaagcttataaatggcgcgagatctttggcccggatctccacaaacgacccggagggggggggggggggaagcgagatagaccgcgctgtgacggtgactcaccgtctagaggctgccgagggaggtccgcgtgtgctcgcctcccattgtcggagcagtcttcggtatttacgcgagaacaaccagatgaacatgttgacgtccgggtacgagaacctagggaacaccgcgctgtctcccccgaataccaccaccatcgcgaggtatgcgatcctcaaatcaacgacgacagcctcgatgtggacgaaggtcaagcagaaaggacggggtgacgagactcacgtgatgcccggtccaacgccccgtcgattggccgctctcttcgtgccgacttgctgcttttcctcgacttgtcctccaccgaggacctttaaatccactcgactgccgatcacatcctccgggcgtgctgccccatccccacggtcatcatgcgcggcaaaggcgtcgtcgaaggagctcgtcaccgtgaccggcgtcttgggcgccttcaacacggatcctgtcgagacctcgtgcgcaggcgaatgaagcaagggagtcttctccgagaccccagagagggatctaggtctgacgagcggggtcgtgtccggtagaggtaggtgggacaacaagtctctgcgcgtgtggagcgcagaaaagacgatcagactcaggggcttgacgacgaggacgagggttctactgacaaggtcatcccgagggtcaaaccccacaatctcaacctcctctgtccattcttgctcaaaaccgtcccatgcccttcccgctgaaggtcatcaaactcgggcagatactcgggcgagacgcaatccggttcgtccggtagcaacagggatgtgaacctgcgataaccccgacggatcgatcagcttggtgcatggcgacgttcaccactgaaccccccgcggacctcttcgagactcacttcatcccccctacgagaccccgcaagagtacccggacgaatcgattccttgggctcaacctgctcgaaatgtcaatctcgacgtgaccccaatcgtgcttgtcgaaaggtggcgtgagtctatcgaggtcgatccagtggagtgacgagatttccgagggttgcaaatcgggcgtaggtgagaagggagagagttgaagaaagactgcggggttgggaacgtcgtcgtaagatcaccgtgtatgtaccgacaatccatcagccgggatgctctgacgtcttaaatcgtcgttccagtgaggcaaccgacgccgcatatgacgactcaccgaacggactgaggatcatcaacaacctcttgcccaaactggtcgtaatctccctatcatccaacctccctacgaacccatactccttctctgcgagatccactccgatctcttcccaagtctccctgagcgccgtgtagtgggacgacgtgtccgagggttcggaacggccgccgggaaaggcgatgtgcgacgagtaacggtcggacgggcgcgaggttcgacggataaacatgatctgcggggtggtctccggatgagagacccaggctatggggagtgagattttggtgacatacagataagctgcatgtcctttgctaatgcgacgaacatgtcgaacgatgatcagccgctactcacgaagcttgaaaaactcgtccagctccatcccgaccccccattcctcttcggggatatctaatcccggcggtggtcttaatctgagaacgagcgctacggacgctcttcgaggttgtgtcggtggagattgaatgatccggggtggggtggaccgaacggacaagagggcggagaggagggaggaggtggtggtagctgtgaggattggcgtgtcaggaccgtcagatgcataagaagacgatacggaacgagaagcttaccactcatcgtagctggatctttactgcccattcggggagagtgtatggattgacaggggggcgcttgtgctgatcgtccgagtcgtaggatcaagctttggtgtaataggcgagtcgagtcgatacgacgcgaggtttcgtgtcgtgtgagcgttttcggaacgggattcgtttcgagtcgtcagagtgtcgatacaagatgttggctcaggttctcaaggcgagtgatggcatcacctctgctatgtgtgggactagactgtatgatagctcatagttacactcgaatatgatcgatctggatatccccggccggtcaatggaattcccccaacgaagcggatgcaaatgacgaggggaagcggagcgaagggggtccccacgtttgatcatcggatgtatatttgattccgtattacgcaataaaacggaattatatttacatccgacaccatccatctatccatgcagatggtcctcctccgatctccgacttgttttgctggttgcgatcaccggatcacagtctcatcactgaacaacccaccgaattcaaacggtcagctgaaatgactacgatagatctctctcccatcgcatagactctgagacttgcctcctgcgccactccccggaacggtcttgaagacgaccgtctcgagctctttcgccccgagatcccggtaagctgaatacccttcttgcgagtccgtcaggtgggcgatgaattgtcgttcccgcgaagccgggatgagcgagacgacgcaacctccccatccggccctacacagagggaaatgatcatcatcagtggtaagatcgactcgacattcatcgtcgcgcgtatggatgaacacccggtactcaccctgataaccgactccccacactgcctgcctttcgacagacactgacgagctcgttcagctcgtcattcgaacactcgtaaaagtccctacaactggcatgtgactcgttcatcaacctgcccacgatctcgacgtcggtctctttgacctttccgtctgtctctcgctcctcggtcggggttggggccgacgctgagccggctcgacagatcctgacgacctgtaacactctcaacgcctcttcaaagacgtgcctcactcgcttgtagagcaagaacctgcccccctggtccgaagtgtccacctcgattgtgctcaaaaacaccttttcaaacgcctcgtccgacaggccggccagctcggccaattcgaatcccggggcatgcccggacgttcggaaagattcgtccggtccgagtacttcgtccacctttgacaagatccgctccaaggcacgttccagctcgtccggaccgagcacatcgtccgagcccttcttctccccagcgaacctgcctacgatctgtcggagttgcagcttttccaccccgtccggcccgtcgtcctcgatgacgccgagagcccgacccaacaccctggccccgatcagagtctccatgacgcgcaaattgtactgcttcttggcgcctgctgaaagatcgtgcttggtcaagctgttcgcgatgaccatgaccaatttctcctctacatccaccgcctctccctttgtagctccttcgcttgcggagatgggcatgctagggagctggaccatttccactccgagtttgggtacgaacgagacgtaaagcccggctccgacccgggagaggacgctcgcgctctgatccatcccacccgaattgacccctatcttggcctcggcctctcgagccatctgtaccaggtcggcgttcctgacccgtcgttccgcatgtccctcggtctggtcctcgtgcttgtccgagctgacgatctcgttcccgagcaggatggctagaagggcagcgacgatcaaggcggccgagctggagagtcccgaaccgggcgggatggaccccgtgaccatcaagtggagggaacgaggttgatcctggtgtcgagtaaagtatttgttcaggacgcactatcgtatcgtcgagacaagaggtcggttcagcgtttcagaaggtgggagtttcgctcgtgcaacgggcaacgggttggggggcggccagactcacatccagtgcgctaccgaggtaagccacccaatcccccctcttccccgttccaccctggacctgccatttaccctctgacgaaacccgtcgagctttcaacgtggtcccaggccaagaaggatccaggttggtgatgaccactgtacacccttcttcttcggacgctggggtcagagtcgaagtcggggtgcgggagagggcgatgaggcagtccatctccactgcagcgggcatgactccctagtcgatccagggccgaggagccgagatgagagagaaaatatagtttggaccggagaataagctactgtggacttgtagctcatgcgaggcaggagcgagaacgacgggacaattgcgggggattgttgtcgaaacaggggtaataatggcgacgaggtggaacatagtgcaaggatagagtgggaggagggaagacttacgaaaaggcagtaatcgatgtgttccctgaggtagcacgattgaatttcgacagcaacggccagggtcacgaaggaggatgagagacgaggtcaatcgcaagaggtaacgtatcagcttgctgtatcacggacaccggctcgacatcgcgcatcggtcgccattaccactgtcgccagcatgaaagcctttttgattcgagtatcactcacccgatcaagttgatcctccccggagctctgacgacgtgctccggtttctctccgaattcctcttggaagcgggtcgccaggtcgttccatcgttgcctggtgacgccaacgtcgacatatgtacggagtcagcttcgagtcacacgtctcccatatcaaggtatccgagtgagatgtagcgtcgacgctttgtgtcgaatgagctaggtaattttacgaatctcgcactcacccttgctggagcaggctttcttgcgggtagatctcgtcgagcgcgttgtagacggtgacgggagcgtcggtggccatcgttgcagagtcgtcggtatttttttacactggatcgatctgaagagagtagggttgactctcgttctaaattgttccgatggttgtagtgttctttgtaagacgaggaactgttgaacgaggcaggacacagtgtgacaatatgggttcgggtagtcttttgggtggacggaggggcgagcgagatggacggatcacgctcgtccgttcgaaacaaacgtcacctcgtgggtacatcccattgaattatgatatatatttatatacaacacacttcactagatcactctgggtttacaccgtggtagtcttatccaactcattgtcgctcagagaagaacactctcagatcggcttgttaacaaaacctaaaaagccgaaacatgtcgtccgatttacacccttccgaagtgccgcacaggcgatgtaagtcgcatcctcctacttgtcggccagtgcacaaccccgacctgactttgacaatgtcacgacccatcatagtcaaccccctgaccaactcccacgtactcgtctcacctcaccgaaccaaacgtccatggaaaggtcaggtagaccctcctctcattcagtccctgccgaggcataccaaggactgttacctctgccccggcaacccgaggatgaacggagaatccaacccggatttcgacgagacgtacatttttgaaaacgacttccccgcgctgctgcaacctaatcccgtgaccgtccccgcgactgtcacggatgccccccttgtggacggggacgagcttttccaaaccaagcccacgttcggctcgtgcaaggtgctcacctactccccgcgccacgacctcaccctcgcgctcatgtccccggaagaaatcaccgcggtcatccggtgctggagacgggtctacgagatggagggcggggtcatccgggctggacacaaggtggatgagaagggctcggtggagactctcggggtggacggtttggagcaggacgtcggtagcgtcaacatctttgaagtgagtcctcgagcgtacgatagcagagcatgggatggatggctcatgtgtttctggttccacggtgcggtgtagaaccggggaagcatgatgggtgcaagcgctcctcatcctcacggtcaagtctggtctacgagcttgtgagcgtcacatatctccccgcctacattaccgttctaccatatactcacccgatccgttcgctttttccatcactcgtccttgactccctatagcgtccccgaagaacctttgaccgagctccgttccctcgtcgcctaccgcaagacccactcgtctcactgcctgctgtgcgactatgcgcagaaagaggtcgacaagtacctcgctgccgatcggaagggggagagggtcgtcgtcctggacgaagagagcgggttcgtcgcgctcgtacccttctgggcaacctggcctttcgagatcatgggtgagtcccagcggaacgcgtcgcaaacaccttatggggtccaggctcgggctgatgggaggcgttggtggtggtgatagtcttgccgtacaagaggcatatcacggatttgacgggtatcacggaacccgaatctctcggtctggctagggtgttgaaaaagatcttgacgcggtacgacaatctctttacgtgagtaccctgcaccgtgtacggaaaacctcgctttgggagcgttttgctaacgtctcacctcggcggtcccttcagcactcccttcccgtactcgatggggatccatcaagcgcccttgccccctctcccaggaaagaacaccccggaatcccctcacccggcgcacttccacatccacttctaccccccgctcttgcgtagcagcagcgtgaggaaatttttggtcgggttcgagatgatggccgaagcgcaggtgagttccgccgactcccaaagctttgtcgtcctttttgtcctttttgtcctttgaggccgggcgtgtcggaaggctgatcatgcggacgtgtgtgccttgctcacgggacagcgggacttgacggcggaacaggccgcacagcggttgagggagcagagtgaggtgcattataccgagaccgtcaaagcgagcgaataagcggtatatatcgtcgtggcaaatgctcggaagggggtatctaaaggtcaaggatggcagtgagtggggtgcgagggttgttgtgagaggttgaagcaggcgggaaccagcataaattagaacaagggcatgatggtggttgtcaaacaaggagatgcattctcattttatcgtcggctgggccaggtcatgcagcgagaaagttcacgacatcgagccggagcgtactcactcgtctgcgcattcagtcagactagcgtcgaggcactcatcacgatgaagatgattttcacgcctctgagggaaccggcgtcgttgatggagttcggcatcatcaaggggagtagacgatcccaatccatggtgaaatccgttttgcgacgagcgctggtaaactttgcattatgattgaaatagaaatgacgctgaaggaacggggtccaagtggggtctgctctcggagaggtgaatcaagataattccgaacgaatcctagcaacaagtttcagctggatacgcccttgatcctgtgtcactatctgattctgaaaaaccatctcaaccatcgcacattgagatgtcccaaattgttcggaatgtcacacactgtaaccctgtgccaacttgattttaagttgcaatctttgcacccgccaccatctcagaacatcggtcgatgtgaatgtcctgatctggatctcctatcgcttcgtaacttctccaggatcaccatcccgcatcccgctacggccatgtacacccatcagatatcgtttcatcgccgaaccagtgtcgagcggatatgcttccggttcaagaccatttacatccggacgacagagtttccgttttttgtcgatcgaccgagactgccaattagcaactgaagacgtgcgacgatctttctaggctgaccatcggccgtcataagagctcgaacttcagattgagacatcgacaaaaggacatatcctaccgacatgtcctctcttgagcagcgggaagatccgttccccaacggcaaacccaaccatgatctacttcaaaacctctcattcatgtaccaggccaacatctatctcaatggtctaggagtgcgtcctactccagtacagcctgctcaagctggtcctagtgaacaaaactccgccaagaagcccaagtgtgcgagcgacggggacgttccggtctcatctgcggagcgacccggaccgctggacgcaatagcacgacgggccaaccggggctacgaatatgcgactcagcattccatgctcaagacgtgagtaccgagagaagtttctagtgggtctcaatctggaactctgacgatggtcgatccccctcttatcgcagcgacccgagtatcaagcgaacgttctgctcgaaatgctataccgtcctgatccctggcgtaacctgcaagactcgaatccgtggtgagcctcgtgtcaccgagattgacgtatgctctgagctgattgatcgcaagtacagcatcgaagaagcagccacatcggatgacgacgacatgcaaccactgttcctcgcaatcatctctcctggcccctcctcatcaccctcccttggaacccgaattgaacgcatccgaaacatcggcgacagccctagtaaacaagccactggatggccctgttcgacacgcccgccgtcggaaactcgtccgtcccgttcccttttggcaaaaggcggatcacctcgtcgtccctacggacggactgcatcgctacgtccagcctgtcggtaacggcgagaaacagcctcacaaacggcaacccaagcaggaaaagggcaagggtaaagccacgaaaggggagcaggttgtcagacccgaatgcaagcagcaaaagggcaggaaggacctggcccttaccttggaggtccagccgatcaaggggaaacaaccgcctaccgaaacgctggcacctgtccctgagcgtgtcactgtggagatggacgaagaagagatgatgaacatgctgtaattataatcgccagatccatgctggttctcgtcgtgccgttctctagtgtacatgagtatgacaagtcacccggaacttttgtcttacagaccgccactcttccagctgcccctgaaatcgtgtaccacgtcggcctgctcgtcgtctctgcccttggcgtgaaagtcgggctgcccgcctggcgaaaaggcggtgatgggtagtacgagcacttctcctatccgcatgggatggtctagccctcgaagctcgtgccaggtgatggcgtatcgtgccaggaggtacgaaaagatggcatccgaccagagtccgggaccggtatgttccatgctatcgaggtaagggtcgagcgggttcagcgaggggggctccccccaaagaccagggagtggaactcacatcggcaagatcccttgttgcgtctccatcgaatgttcgatatcctttactcgccttgcccacccatccggttgttcttgtttcaacctggcgatctctgccggcaggtcaatctcgatctggtcggcgacgtattgcgtcgcgttgacgacccgtctgacggcatcgacgtagatcgggtgatgaggagcgcccgtgagggtccattgacagatcccgagcggtctcggccaggactatgcggagcgacaggaggggagggtcagctgtgtcgcctttcccccggctgtgatcgcccagggggggcatgatcaggaactcacctgaccccagtccatcttttcatggctaatcgaccggaaccgagcacgcacatgagccactcgattctggaccgcgccgcacacaaactcctctcatcgcactcacacatcgacgtcgatcgcgaccacgacgctaggctcggacgcttccaccgctcgcttccaagtcgccatcggtccatccgtggtcgaaatgtcgtagatctcgggtttgatcttgccccattcgtcgatcggtcgaagcgggtacgtctgaggataagggatgatgcgtaccagtgcgatgtgttgatgtcagtgttcgatcccgacgagacggattgtgcgaatcgactggcaaacactcacgtctacgtcggaatactaccacccgtcattgaagaaagggatatccatgagtctcccgttctcagtcgacgacctctgctcgatctggccagaccagactcaccactcctccttcgagcaggacgacgaggtacctaaagaaatccgcgcgcatgacccctctcttcatgtactcccaggcccacatgacccctcgttccgtcgtcctcgtcgtgttttccgggccgagggcaggcaaaggtgaggatcgggtatcgagttcgaccaagttgaaccccttgtccgaggacgaggtcgacgtcaacgtcgactccgcttccgattcttcttcttgatatccggggtccttcgaaccatctccttgaccgatctgggtcatatcgacgatatccaactcatcgtccatcccttgcccccccggcccttcgtgctcccacccggccttgctcttcaaccagctcaacgcgtgctcatccgtataaaacttccaatcccacgctttccccctaccctcttgctccccatgcatatctctccacaacttgaccctcttgtccgtagggtcatatcgcttatccgtctgatggatggtcctgaactcgatcatccccggtttactggaccctgcgtgggtgtaggggagggagtaggtggtgagggctgggacgaggagggaggatgtgtggtcggggaaagaggattggaggaacgaggtcagggtggagaggtaccttttagatcgaggtcgggttggaccggtcgagggtgggtcagtttcggttatgatacaccgatgagctcgggagggggaggggggcggctagactcactcgtccatacgttctcctagcaggtgatatcgatcctccgcttcttgacccaaatccgccagcctgaaaatttccggctccgatggcaactctgacacttcatccccactgctagtatccaaaaccaagtccaagtccgtgtccaagtccaggtccaagtccaggtccaagtccagccccgtcccgtcctttcccgtagtcgaccagatgtacaccccgatagagctcaccgctatacaggcgaggaagatgacgttccacgctcgtctcgtcaaattgggcatgaacgacgaggacgacgacgacgaggtgcctttggtttgttgtctatcgagagcgagagggaggtaggtgccccgtgatgacgacgacgaggtggtcgtcgagaatggattgcgcatttcttttggtcgtgcttgccgtcagcgagctctgttggtgagccagtcggcagtcgatgatggattctgtgtgttctaccttgctaaatgatcatatcatatcatgtcgcatgtcgtcccctatactactacgtagactacgctactactgtaccatcactcgaccgacgtaaactctcaaacacgagcacgacacacactccgttgatcatcaaaatcaaaatcatctcatcatccatcatctcttgatcctctccctgttgcttccccctctcttgatgccgcccctgcctgatgccgctgctgctcccgcctcggtcagccacaagccgaggaaagcaaaggaggtgttccttccttcctttccctcgcgcgcgcgccgcgggaacacgcctacccgagtggcttgacctgacccagcacagccagctgccagctgccagctgccaactgcgagactcggttcccactcaccggcggcactggctcttgctcgtagtcctcgcaccccggcccctgacgcgccaacattcggacgacagggcttggcagtaactactgagctactgaatggtatgcatggatgaatgatcgtgtagacgacaacgagggtgtacgtggtgggtttccgagaatgttacattacatcagacccgccccggcaagtgcgacgaaaagtgtggcaaggtcaggacgggggcaacagaggatcatcgtagaagccatcaacaggtgattccatcttgccggaagagagaaccaaacgtcgagcccccgacgaccacgtttgatccagtcacgatctctgatagacaggatagggtatggaaggcgcgaggagatcacctccgtcgaacgctcgacctagagcaagacgctcaacccgcccgccccgatcgtcaacccgatcacccctgcgacccagacggcgcctataccaccctgaccgcctacgttcctccccgccgcgttcaacgacgaactcgtcaccttggccgcacccgccgtcgtccccgacgcgcccgtacccgtagccgacgctccggccgtagactgtgcaacccctgacgcctgggcgagactccccttggaatcctcgctcacctcgacgacgttggtcggcgcactgaccccgttgagggtagcagcgacgttgaacggggaaatcccattcgagtcgtagaaatcgagcaggatgtggttgggaggtctaccccagagaccgacacagttctcggctccctgtccgatggatccgtaccccgtctcggcgttggtctcgttcaacaggtccttgttgggtaaccaagcgttgatcccgaggatgttgccatagacgtcgagatagtggttcgtcagggacaaggtcgtcgtcggcgaaccggacgatcggttgacgttgcacgcaaagtcttgatcggtcacgtcgtacgcgtcttcccacatgttgctaaactctgtatgcatgttcagggcacccgagcggaccatcatggtcatcagcgtccatctcgcctttccgcccgatctagtcaaagcgacgacccgcgacttaccgtcaatgatccacccgacgctgttgaaatcggacgagtaatccataaagacgaccatcctccctccgttctcgatcatgcttcccaacgtgggccaagcgtcgatcgcagtgacggcaccggcgggctggtagacgctccccgtcatccctgccgcgtcaaacgcgctcgcataggtcgacggggtgatcgagtcgatgttgacaatgacgagcgagaggactagcagtgcatccggggagagagggaggtcgtctcgactcaactgccgatcccttgaacttgtcggcatcaacacacgactcaccttcgttagggttggcgtccatccatcctttgacctttgtcaaatagttcgtcaaggatccaccatccagcaaggtctacgaatcgagacattcacgccatcaataccgctggcgacctctttcttttgtgattcgcactcgcgccagggagacagaacgggtggggatgactcacgcatgaactatgacacagcctgatatccccagaactgcccttgtgactatcagtcgcgcaaggagagatcgctcgtcctcggtcagcttcatcgtcgagcggggtgtttttggtcgtttcgatgacgaggggggacgagggagaatgacatacgcttggacttgcaacgtcctcactccatcgttctatcatcgtccagaaccgcacacacacacacacacacatacacgcaaacgcttttgatcagccggccggaccccaagcccagatggttatggctcgacaagtccgagttctccattgggcacttaccaactgctcgacgacgcccttgccctggttatccatgatactacttccattcccgtacgagttatgcgtcccgataaaagtcacattgccgtaactccgatcacacagctcggcgtgcccgttacatgtgctcggaggagctcgtcgggcgagatcgagatcgtcgttcgaacgggcttgagggtcgagggagaggctgagagccgaggtctggctggagaaagccaggagagcggagatggcggagagagtggggatgaacatgatactacgtgctacgaggtggactcggtggggtcgagatggaaatgctagttgctgggtcgatgattcgatggcgctccaggcgtgtacgattcacttgatggttatccgctgcagtatgtcgacggctctcaggaccgcgtcgtaactaggcaatcgtaggtagagtgtatgaagtatgtcgattatcaatcgtggtgagctaggtagattgagtagattcgatgacacgatttcgatgtggccgggctgtgtcgatgggaatcggttgtcgggttttgcaagccaaactagggttttgtttttgttttgttgtgatgcaaacgagcgagcgagtgtgaatcgagatggtcggcttgggagcggggtagatgtcgacctcgagataaattaaaaagagagtggcgaggttctcagtgacaagggtacagtcagtatctcgagtatggataggaagcgtttgcctatgcgattgatcaagagggctttgtggatggccatgttgaattgatggtttgatcccaggctggctgcgacatcgcccagcacccagcacccagcccatcccgctttcctcccctcgaattcccggctcgtgatggaccgcgcgcgtcgttccccccttttgcctcgcctcgacggcgattgcgtaacaatggccggccgccacatgtacctacgcaaacacggttacacaaacacaacagcaccagcgatcggtacggcagatgcccggcaagtttccctaacgatccggcacgagggaggaaataatctgacatcacacaagtgctacaacaaggttcattcaatccgggaaatcgcaaaataaagtagaaatgtcgagaagagttgaaaatcacaccaagctgcatcgaaacgaggacgtttccagatcggccgtcacgaccatcttggggatcaagtcccgcgtcgtggttcccactcggctcattgggcctcctgtaaagtcccgtccgagaaaggtttcccgccgatgtcgaagtgaccatcgagttggttggtatatgtcgagttgaaaaaattcgagatcaagagaaaaagaaggaatcgatccggcacccgtggcccctgccctaccccgaggcagcgtgcaccgagagtacactctgccgtcgccgcccctgcgtatatatgctgtgccccccttcccgtcaattcagtttcgagtcttcattgcgagctcatgcctcttccgtgacgattcggatgcccttgccaaacgtgttctctcctacaaaccagcaaatcagcaaaaagaccatttgtccaggtcagcttctcgttgtccagccgaggacaagcgcgtaatcgagattctaggactaaccgctgtagctaacgtaaaggaacccatcctcgtccctaagaaccgcgatccaaaaggcaaccgtcaacatccatctgcgacaccgcctcgatcaccatcaaatcaaaagctggacgtacttgtgttcctcgtagatcgtgctcatcaaggccgccgtcggaggcaagatctcgtccacaaagatgaagatggccttttctggggcgagcttgatacgtttacggatgacgtagacgaattgaccgaccgtcaggtcctgtcgaaagcaaagcaaggcgagagaggtttagcgagccgaaaagcacgatgcgtgtgctagcaaatcgagcttacagcggggacgaggtacttcttcttgtcgatgtcgctaatgtcggatttctctaccttctcgcagatgacctgcgggtggtgaaagcagcccgcgtgaaaaaggccgagtgcatagaggacgaaggtatagacgccataggtcatgacaagacggacgaagatttcgatcaagctcagtcagccttcatcgtagcgaggcgggatcatgctcgaagacaacgtccgtaaagaacatctacaaggcactcacggggatacggtcattgtacttgttcctaatcctctcagcctcttgctttctcttgtctactcgtagcaacatccgaatcaccacaaggccgaatgaccggcaacggtatggaagaggcgaacaggaaaggagaaggggtggatcgcatgagatgggattggttgtgagtcgggccgaggcgagatgcagcatttccatgcgatttgaatgtaagcagcgagcaagataagtggagtagtaggcagtcagtagaagaagatggacaggagcttgtcgaagcaacgggatcttaccgaaaggatgctcatccttgaacttcgagcgagccatggtttcgtcaaaagtctctcttgcgtatcaggtaaattgaggagacactgagggatctcatatggtccatacacacgagtccagaccgagccgagtcgtgtggtccatcggatacagaggtagataggaccaagggtgatgagagcgcaaaggaggtgcacgagtcgttggccaaggtcccgagcatcgacaaatgtccgttccgcgagcgatcgccaccgcgaggatcagagcagccgtcaaaaggagatcaaacacattacacaaagtcagaaagaggttgcgaggtcagttcctggatatcaagtgaggcgacgggaggggaggcgatggccgcgtcattcgaatatcccgaaaggggaatgacgaggcggtagaagaaggcgagatggggcaagcgacgtgaaactcacgctaatgtatcgggcgagtcgtccgatttgcttagtatgggatgagatgtgagtgggttgcgcagagttgggttgtagctggtggtggtcgacgggtgtatgtgtatgaacgatatgatagtggttgatggggtgatcaaggtcgctcttgatcaccccatcaaccgctatcatatcgttcatacacatacacccgtcgcccaccctctcggccagtccccagcggaccgcgggtccgtacccaccgtagcgatgacgtaccatacggccatcgggtcgtgcatctcgagcgcatcggggaggttgaaccctttcatcaaccctcggacgcggacgagcatggccgatgtgaattcctgtaacggcgtcggcgatgatgacgacgacgaggacgaggacgacgaggtgcggatgtcgtgaatgagcttgtcaaacgagatggtatgcggcgtggtgatatccaggggacacatgctcatactgaacgttcccgcattgacggcctcgacgacctcttgtgcggcgtactgtcgccaagacgtatgcacatattcagccttcaagcgtcgccctctggcaatcggttcatacgacccggtcgctggctggactcacgggatcggcgaaacagttgaattcggccaacggggtcgtattcccaggaacgtccagtgctccacccatccagacgacttccctcacccggctaaacgtctgggggtccgcacggagggccagggcgacgttgctcactgtccaatcgcaaaacagagaacaaagggtgagtcgcaagctagagtaacaacggtgagactcggggacgtgaactcgacacgtacgaggacccagggcgatgatcctcacggtaccttcttcctcctccttcaaaatgtcgaggatgacctgatgagccggtttatcctcttcgatgtacaagtgctcgtgtaccgctccttgggcggcaagcggggccggggtaaagtgtggatgggtctgggaaatgttggacagcccgtccgtgccgtgctaagatcgaaggtggattcgaggcgggtgagcgtcccggcaatacaatccaagcacggagtggaaacaccctcttacgaaataggcagcgacgtccctctccccatcgaccgggccttcagctccacgggcgagcacgatcttgtcctcggtccggacgttgcagtacctctccctcgccgagggatcgtgctcgaattcacggacgagcgaggcaaagatcttgagcgtattgtcataggcagacgtggcgagcgtgttgccgaaagtgatcgtcagtgccttgacgtcgagctcgggctgaggcatggtcgagagaggtagaagtcgggatgatgattagcgaggcaggctcaaagtcgtccgagcacatactcaccgaggcgagagcgaggaggatggcaagaacgtcgtccacgccgggactgtcaccccgaggtcaattgaatgcagagtttagctcggatttctgtcaaggagagaagagaagggaagggatatgcgacttgctcggtatcgatgatgactttgtctcgggccatttttttcagttgtttctatattcgctcgtggtttatgagtaaggaatggactgtgtcgacgggggtagtaatactatgtctgggaggtgggtgggtggtcgcccttgtgttatatatatccaactccgaggtctgctccgttttgatcggggaaccaactctctctctctctccctatcggttcgtccgaatcaaagggaaacgtcaataattgattacgaacaaggcagtaaatttgacacgtcatagaatgagatagttgccattacgtaatccctctatgcaccattacttgccttgcctttgaattgattgataacaatttcaattcatagcaaccatcagccctccttctgttcagcttgaaagtgtaggtgaccatcgacttgaccctcaacttggtctttgcagtgactcaccagcccctcccccccatcttcctcaatcgcacgatggaaaaggtacactttcaactagaatctaccctccccgaactcagggacttggaggaaaagggtctctttacccgcgcagaactccggcaggtcaccttgaaacgcacgaaacatgagagcaacctcgtcaaacgtgcagggaaaccagaggattacctcgcctatgccgagtatgagatcgggttggaaaggttgaggaggatgaggtggaagcggttgagtgagtcgcgaatccctcctcgaggacaaggtctatcctagaccgcaggctcgctaacaacattatggacatcctcgacaacgacccctcaatcacagggatggacaagtctcaacaacctcgatccatctcttcacactcgatcccacgtcggatcctctacatcctcagacgggcgacggaaaagttcccgagggatctaaggacctggttagcctatgtcgattacgccaagagcgagggcatggccaaggtcgtcgtcaacgggttgaccgcgtgagtagagtgatcgatcgtcgtgccagctacttgactgggtactgacgacctcgtgcaccggacgacagcgctcttcaattacaccccctcgaacccatcctctatatcctcttgtcgcagcactacctcgacccgatccccccatcccacaaacgatcacaactatcatccaccccatcctcttccacgtcgtcgtcgtcgaaattctcgatcgaaaacatcccacccgctcgaaagaccttgttgctgggactccggttcttgcccgcaaacccagacttgtgggtagagtacatcaagctcgaagtcggctgggtggaagctctgaggaggagatggaaggtgctaggtatcctggacgaggtgctcgtcaagactgaaaacgacgacgacgacgacaacaacgtcgacgttgaaggtgccgaggggttcacgttggatcctctcaaagaagaggacaacgagacggatccgatcgacctgcgcagggatcagggcaagggcgcgttcggtcagacgggggaatccgcccgcaaaaaactcgtcgacgggcaactcgtcctcaccgtactccgaaactcatttacccgaccgggtttacgggaaagcctcgactatcctttgaggctcgtccacctcttccgcaagtacccgaccggacttcgcaccaagttgctagagtgcgtgtatgagagcatgcgggatgatccgctcgacaaggatcacatggcgaggagggtcaggagcgaggccaaactgttcgatcggacgtacgatcccgaggtggacgaacaacagatgcaagacggtcaggccgtcagccatccagtcaggggggaatccgatcggatcgtcctcgcccgtggagaggaaaaggtcaggacgatcagcgagatcatcaaagccatgaaggcggtacaggacgtcgaagccgtcctcgacgacgggaaaagaggtcaagacgccaggatcgcttggaggcgagagtgggaggaagaagtgggcgagtggatcttgaggtgggcgggaaggatgtcggatgacgaggaggatctggtgagtcgcccccgcaggaggcttttttgtttatcaaaccccaaatgaggccccggctgacgagcgaggggttgacggtcgtcacacagcgaaaatacctgttggcttcactgacaagcttgacgagaccttcgttcggaggcgagctcgtcccatcggctcgactcctcgcggatcatctggactacctcttgaatctcgctccaggtcgagcgccgtcgtcaaaccgactctgcacgatcgccaaggactacactcggttacaatccggatcctccaggctgtggaggtccaggctcgaaatcgaacgtcgcgccgtcgaggcgagcgacgacaatgaagagcgcaagcagaaggaggccgaggtggggagattatacctctcggccatggatgcgatcggatgtaatgaaggcgctacggacgtttgggtgcaaggcctgaactggttcgatcgattcgtagatcccgcgaccggagcggaaggcatggcgaaccattggacgacggggatcaaggctgccaagcgtttcgcagcagatggagcggatggccgagcactctactcgggagtattgttcggctgggtagagagcgtcttgatcggcctaaaagatgtcggaatcgcgcgagtccgaaccatcgtggagacgctcttgaagtccgaatggcaagctccgtcgaccaccttgtccgccacgtttgatgcggtcgcctcgctgcggcatctgcccaacgtccaacttgccccccttctccagtcgctttacgaagcgtggcaccgaagagcccgccacgaaccggcacaaaaagtcgctggctgtctcgcctacgtgtcttggctcttgacgcataccaagggttcagcgaaaaaggcatgggacctcgtcgagagcgtcaagcgagaggtcgagaccggtgaagctggcgggctcgaggggaaaggtggactcttgagacgcgaccaaaagacaatcgagagggagaggagggagatggtcgtcgcgctcgaggaaggatggagggatattctacgcgccgctgagaggaggcgtgatcaggatggcgcgtctgacgatgagactgagagcgagagcgaggacgacgacgaggatgacgatgtcgacatggaatagtcgggcgagctgtatcaattatccagtataatcatgacttgcctcataaacgtgcgcacatcgagccgccgagctcgcttcgtgtgatgacaccgtggttgacgatcggcactgaacgctatcccatagacgggacatcaatgggacaaatgtggtattccggaccctgggttgtgttcgttgacaagcgcaatccctgcagccccacccagggtggggttgttgcactttctgaggggcttcgtgaagatccaggtcggctttctcaaagtcgacttggcctcgccagcaagacggttgcaacttttcaatacaaatccggcgaaagcggtaactatatttcaacagcctcccgaagtcttccggagatcgcaagtttcacttcgattacccgagaagcactgcgcattgtgttgtagtcctggtacgtgatgtagattggcgcagtgaacattgggtggagacagagtgcattcaagaaggagcttgcttgcagttgcagtccttgaatgtgtttcgccactcggtggtttggctggtcctgactacaactgcaacagaaagtcaggaggatgccccgtctttgtttcgagccgccgaacgaagcactgccatcacgcctaaggccgccagcaccataagccttgtcacgttcaaaagaagacctcgttccgaaattgtacaatagtctttgccgctcgacatgagtcggtctccgtcgtgtaaaccccattctcggtctgccgccactgaacttgtatttgtgaaacttggcgccagggcctcaaattatactatgaacgtatgttggagatacaaatacacaagttacgggaccggccctttcgattgtaccattataatgagcctgtgcgaaagatgactcgcccttttgcgatacagtgagttcacgtcaaacctctttagactcctaaccccaactcagtatacgcaagcagtccccactccattcggggaagcccaccagccgacacctaacgtgagaattacgcagaggattccgccgactagcaatacaaaagggagcttgatcagcgtatgacctttgaacttttgcgatggaggcgagaactcactgtacatgatggccaggtagaaccatgccatcggtgtcgcccacttgtgatccgagtcgtgcatcttttccgcttgctcgatagccgcaggtatagtcgacaagcagctgcgacacggacagactcgtcaacaccggttcactaccgtcggaatgcagcgatagtcaagatgcgagatcgctcacccgcagaatccgtcttggacgccttggagagcttggcaaggccacaatcctagaccgggtccgaggggcgcgatcctctgcaagaggtacatgacgccagcgatcgaagtgctaaccatgttgcatccaaacgtccccaacttgatgtattgcggcgagatggggttgatccgggagccggcccaccatcggatccatgttccgataggagccaggacgagagcccaggtgacccggcgaccgactcgccagtccgagtagtcggtcagaaggaagatgaggagcgcggccagccaaccgagcaacccgatgacgctgaatatgtagcggtagatttgaggaagaggacccagtcggagtcggggaagatgacctgagaggtgacgtccgaaattgatgctgaaaaagacgacggtgatggtgatccagatgtagctcagaccgtcgcatgcgcaggaaagccaagagtcgttggtcccctcgagattgctgaaaccgacaaaactgttgagttgccaggtagcgaaggtagcgatgcctccggagaaacctatagcaatatgattgccatatcaaacgaaacgcggatgggaagaggtacagcaagatgacactgatcagcgaacgagaaacgatacactacgctcctcgatcccgatgatcgctcaagactcaccgactcgcagtccgacgtacagagcgggccagatcctctcgatctgtcgtcgtcgatgaacgatgaacccgaacaagaaacatccggtaccctgcacccatgccacggggaataccgtcgcccctggatggtcgaacagggcggtcaatccaagcctgacgagcaccccaaagagggagaagaaggcgagtagggagagagtctcgaagtgataccacgggaggagagatgggttggaaggcggaccggcaggaggagatttggcttcattgtgctctcgagtgtctttgcggttcccgaggtcaggcctggcgacgatcgtccgatcagactcctcgtccgaagaaggcatgtttacctggacgttcgtgcttgtttgtgcacgtagatacgtcggatggtttgtgctttgtgattgtggcggaaacccccgctagagtaatatatatcgtcctcgactgtcagatcatagcgagttactcagagtggagcgcacctcgacttgcgacttggcatatctcatagaaactgaagtatgtcgaagtcgacgtcctctcccttttgcaagaatctgcttccgacgggatcatttcttgcgatgacgacaacgatcttgggctgcggaaagtggcgcatttaccgagagtgaacggaagacttccttgttagagaacgagcatctgatagctgatagtggggcagaaaaagagtcttcgcacaattacaacttgccacaaggctgggttgagctactagcaagagagggattattgcccagtcgcagagcgcagtccgtgacggctaagatactgatcaggcgcatggagggtattgtcagccctttcggctggaacacgacagcacctggatgcttaccggttgacttctctcgattttgactcgtcactcgaattgtacacgagggttacaatctgatgttagagtcatgctatcgatactagatccacccaagggcaagtcactaaccctttcggaagtaaatccttggcgggaaaagtgtatccggtgatatccaccttcaccaggtttcacgtcgtgagctgagttggcggagcaaaacttctggatgaacaacgtccaaggttcgggggaaatcttcgaggacctatcagatggtattgggatggaaaactggatgggagttgatccagggaggagctgatccagtgagtccaagccgtcttcactgaatgcattcaaatcgctgaacataacgttgcagacttgaggaatggacggacaaggtgggcgtcaaggagggagccagtggactcgccaagagagtggccttccaggttcacacaggtaagttgggggtagagcctcctgcatttcgacaaacgacgaacaatgaacaatgaatgacgtttttcaataaaacaactgtttccataacgacgctgacggtggtctcgattacacttgtagactacaatgacaaggcttggcacctcatactgcaagccaaagttttagctgaccttggtgcagcaaatgagacccttctccaaggaatagtctttttacattttttacttgcgggtaagggaaagaccttggatcctcctgccgtcaaaagaatccttgggcacattggtaagcagcacgtgcgcttaccaataaccatcaatggatttctgaagaccccccaagatattgatttcttcagagaaccctgtgacgaacaccgcacagaagaatgataccaacaagctggtaccattttcatggatgagaaacacatgcccagggaaggaaacctggactacaggatcttgaagatcctgcgtgtgcacatgcttgacgatcgaagtggaaggggtaattaagggcacgcactgtgacatctgctttactctttggtatcaagagccgcgtcgcgtttgatggacaacagctgccggactggacttttttgaaccaaaaactgagtcagtgacgactggctttgggactatgagtatggctgcgaataagggatgaaggagagattttgtaggctttcacggcgcttaagactgccgaggatagtttaagcagcagccctatcgctagtcaaccttgacgtttggttttaaagttctgttggggcgcggaccgatattaaattctcaaagcctgctcagcatactcagcaccgccttcgaatggtggagcttgttatacggcagactgatcttcctagcttcgtggttcccgctcaattctctgcgatgaccatatcggttgttttcacctcggactagaccgggtgaccagcaacattcaacggcttctacggccctgctcctcatcgacgaaatcactcaacgagctcagactcaagcagattggtcccccgctgcgcttgatactcaactaaccggtcgaatttctttttcatcgtcgttggtatgtcgaggtggcgctgatcccatccgacgatctccgtaatttacccctggctccgattcgggtcgtcactacccctattctcgttcgtctcgtcagcttatcctatccttgacgtgcctagtaatcgacgttcgccttgatcagatcctccatacccgcgtccactctgcgcgattaggatacgagggaaccgagagcgcaggtgagatggagtggaggaaaggatcgaggttatactgtagcaggttcttaacgttaggatgaagaaacgtccgtgaagtgtgttagagatgtactgcgtccatgcccgcaacgtgtttcagttcccatctggatccattacgaattcgatatgagtgacccgagtatatcacttccgcatcgagcgctgtcatcgatacaggcagcgcatttatccagctcactactggattcgagctcaaggcttttatgatgaaaaacgtcctcaacctcgaaactgggactgtggtcaaccttactgggcctctgcagagcagtcgtgtgtggtatacatgatcgtttcgcacacgaagacccctcatcgacaaacagctctatcgtcatattgtctaggattgaacccactcgtgcactttggccccggtctagcaaagatactctcgatgggattgattgattctgtgtctcgtgacattgcgaagtcgagacgccccatcaagcttagggacacgacagagcttcatggtgctcccgtgatttcgtcacgagctatcggtccaatagacggttgcttctcggttgccgatagacaactgatatggcgcttcctggggccatcttttcggcctcccgccggtaggagaaagcacgacgctgatccgatagtcttgcaacaacgatgttaggacccgccgcttcgccgagtccggatgaccaatcgaggtcaacgagcaaggtcaaggagtagcaagtcgaagtcgaaccggcaaatggtagaatatcgaggggaacagcgcatgttattgcctacaaagtatcgaatttccgattggagctttcacgcgcatcctccgcgatgcaattcgtacagtctgccttcagggcttcctggcggaaggtgaagtgatggcattatcgcatgctcaacttgtacacgctctacatgacgatgagccggaacgacctcttatagtatctatagcgaagtgcttgaaattgtctcttttgtgctaccgagtcgtccctctcaatgcccggctaagctgtttgatggtgccaacccttttgttcatgctaattggttgaccgtcgatccctttttaaatggagagcttttccctcaaatctcttcatcttcccgagctccctttaggactactcgagatcgggtctggccaccggcccgctcgcagaaccgaggatcggattcggcgtgtcctcgtggctggtcgacggcttgaagctgtatgcccctatcagccctgagctgaccttgagctagagaacgctcaactgtcgaggtgttgcgtagacgagacaaaagggaagatgcggaccaatcacagggatgtatcaagcactcgactgcttgtagcctgttgtcggacaaagccaaagcaaatcagcctcacaagtgggcttatcaatcgcgggcaccacttaccacttgtgtcaaggatcattactccacaaatcgcacacattcccttcttgtaagcacagcttgtacaacgcagagcccctgtatactgcgtagctttctgtaggcgtagaaattaccactccggggtaagtggatgagaggaatgtggcccggccggatatcttttactcaccttgcattcgatgcaaggcttgccggtaccgtaaggcgtgcccctcttcttcgatgtcaacagcttgttctccccaatagatcgattcttcgaagtcgaagccttgccgggagcaggggctgctaccgatgacaatttctgattcagacgggaccggtcaacatcaattgagccatttcgaccggacaccggttggacttgcatcctaccttttcgcacttcttgcagaccatttccgggaaatatgcagagtatgacgccctcgtaaggtactgagatcgatcctgggataacgacgagccacttacagggatgcagatgagcaggatttggtaagacggacgtctgatgatttggatgaaggggtgctgggtgcgtaagcagtcaagcagtcaagcagcaagcagcagctcgcgcgggatctacagcgatcacaagatcacagacagactctgcacatctcgattaggtatgactggtcgctgtatatcgatcgatcgagagcatgagcttaggcgagaggccaggaagctgatatgtacatagtgtactacacctagcgactacatgtgacgaataatatagacggtcggactccccagctggctggccgtcatccagcttacaggcgcggtcatttcctcatactgcccatattcatacacgacccctcgtcgcatatgccctgcgtcttggatgcggagattcaaatcatccactgaagccgcgagtttcacattcagtagcctaggtttggtataaacgggtcgatactggcagagtcgacccaagccgttgatccgatacttgcgcgagcgtattcaaagctctacgcattcgagcctgccagtaagaacatgccatgggaaacttcaagagtcgcaacagggaggtttccttgagccaatgactcctcaggatgtcggtgtctttcctggccaacacgatatgatgtggcgtataggtatcgatgtgaacctgagaacatcgcttaaatcctcgtgtgacgtgaatcctgctgcgtgacttcgaccttcgcttcgctgttaggatggagagactaggctgtcttgtcgagatccttgattctagccctagagtcctggtcatgttcacttcaggctaccgaagcgaatcactctgtccctttgatctctggtcgacgagattccgggctcaagttggtccagagtttaccacggggagggttctctctgatcagtcgccgataatcgtccaggtcagcatcctagcgatcgaacaaagtcacaagtcgtcagggtctcacttgatctgctcggtcagagccggcttgcttggatcgtcggcagatggctcaacatgactggtcacctcgatcataggagcccgctctccacacctgacagacagcgtcagtctccggatcagtaccgatcggttcagatgatcacgacgaggtgtgactgactgtctgaatatccgttctagaggccaacaagtgatctttccccctcgcggggagcattgatactgcgtcaaggcgtatagcttgcaaggtggatcttggctcattctattaactatttccgaacgaatttggaagccgagatgaaagataattacgatgcgaggagcggtggagtatctccggcgttgtctctgaaggcaagcacctgacaatgcgaaggaggatgcgacgaaaagagcctggtcgactggtcaggactgatcgatcgtgttgacagatgacgaagtcgaatcttgaccgtagattcggcgcgaaccaccagacaggggttagtagctgtttcaaagcagttgcaccaaggcttcattttcgcagtagtgataatgcgtatctcatcagatcgactgattaggcttttggaataggtacaagttcaaataaagcatgcccggttctgtctccctccaagcaaatcaaacggcttcgcctctgagcgaagcgctgtccatgggctcgaatttgctcatgctgtcccgtttccagaaagacatcctcgatcgagccgagctcgtgaacggatcactctcaggcttggtctccggatactcttgttcttgtatagccggagtaagagcttgcctgtacagagctactgtaggggacttgacagtggcgacgggctggtcctcgaggtcttgctcttcagatttgggtcgatcctttgcgaaaaacttggatttggtaggcatgaacgtgaatctaccgctcttgcccttctccgaaatcggttcttcagctgattggtccaacttttgctgcttctctaagagcttgacttgacgacgataatatcgagatccctgaaacatgtaaacgacgcagaatccaatggccaccaaattcaaaacgaatacgacgatggccactttaaaaagggtaaaattgctagtcagtatgctgatagtgaatggaagctcccacacccacagcaaacggccgctacgatagcggaaacgacgggagttaaggggttgccaccgcgcttggcaaattcatgcagagctcgagaagcgagtccggaagagacggtagagttcatgacggtcgatagagtaaaccgtggtagtaacgagcgtgtaagcggaaacgaacgggctagttgtaagacgacaatgtgattgttgcctgggtcaagttccaggcatgaatcgatcgatcgacacgagcagcctacatatccagtcattgcagccgacctgaaactgaataatctcctttgaagcatctcttaggaaacaggagatcgatgctccctttcagcaatcaccctcttccggtaagccttatcaagacaatttgagtgcgtcactcagccttcatgaagaagcccgttggcacacaatccccccgctgcccacgttattgtccttggaggtctagacgtctctatagacgtccacaacttcccaccacgaacaagagcactgtctcacgtgatcggtttcacgggattccgcaaagccgcctcagcttttgcaacgaaggcgcgcgtttcacgggggccagactcgcgcgatttgccttatcgaggatggcgtgatccgttgggatgccctcgcgttcgcgctggaccgggaccttcaggagggcaatcgatctaaggattggcaacgatcggcgccagtgccaagcgacaaccaagacgatcaaaccttgtacatttccttgtagtatgcatgaatgctaccgttcgatacccacgtatggacatgggtccatgttcttggctccccctcgtagggccacggcctcgttgaattggtcaacggcctacgagggtaaatttcccgatggcgaatcctacggtgttcgccattccttagggtccgatgacgaaacacaggtctcatgttcaagcgttggtcagcttgagcaccatctcttttctggagcgaaatgtatttattcgtcgcttcctcgattcgtctgtctgtctcgcgaatcaagcctctccctgcactattgtaatcatctcgctgacagtgttatcatggtagactcattgagcaaggccgccggtattgatcacttcgcccctcctcgagaagatgaggaagggatcactttttcccgcgattggaccccggacgaggagaagcgggcgaagcgcaagtgagcggaacggattcgcgatgactgcaccacgccatgcgaccttgctgatagggcgacttcagactggacttgatcatcatgccgctcttgtttctgggtttcttctgcctgcgtaagtccatctccgcaggtcaaaccgcgttacttcatgaaagctcatccccatcgctgcttcgctgtcgcccccggtagaactcggtaagacccaagatcagaactcattcctgcaactgcagctgaaccaagtcgcgcatagatcgtggcaacatcgcgaatgcgcttaccgacaactttatgaaggacgtcggcatcactcaagaccagttcaatgtcggccaacagatgctttccctcgggatcgtcctctttgaaatcccgtccaacatgatcctctatcgggtagggcctggtaaatggcttacactgcaactgttcttcttcgggatcgtcagcacgttccaggccttccaaaccaactacgcctcgttcatggtcacccgtttcctccttggtgtctcagagtcaggtaagtcaacagcgcaagtgtcgatgcacttgatcatcagctgaagattggcgacccacgggacatagggtttattcccggaggcctctggactctctcgacctggtatacaagggacgagacggctaagcgtaccatggtatgttgctaaagaagcctgtttctaggcaatgcaatggatgtctcactcctccgcatagatattttactttggcaatcaagctggtcaagcctcttcgaaattgctagcctacggaattttgcacatgcgaggtgtcggcggcaaacccggctggttctggctctttgctctcatgggcgccttcaccgtcgccagcggtttcgtactcggtttcctccttcccgattcgttcaagaatccacggagcacgttcttgcccagaaccagcttcttttccgaaaaggagttgcacatcctgaagtcgcgcgtcttgatggatgatccgatgaaaggcaagaaaaagaagcacatcggattgagctcctttaggcaggcagtaggtcctgaggacctcattagctgattaccatccgaactgacttcatcccacggtgtcgcctctagttctctaattggcggttgtggatccacttcttcatcaccttgaccaacaacggacctcagcgcgcgttcgacacgtactcgccatcgatcgtcaacagcttcggctttgctccccttgccagtaacgcgctagcatccgtcggcctcttcctccaaatcccagtatcgttctgtttcagctacgtgtcggatcgaatgtaagtaagggggtaatgcataactagatatgtctgtagcgagagctgagtttcctgacccatcgaatcgcaggaacgctcgagggcagaccgtcatggccgggatgagtctgcacctgctaggatacgtcttcaaccgaatctttaccgagatcaatatgaggggcgtgcggtatttcggtgtcgtctggacgcagacgtttggcacattctcccatccactcaatatcgcttggatgtctctcacgtgtcgagattcggaagaaagagctttagccatggccatgtgagagacgtgtctagtcgtctggccgagatctcaagctcacgcgcgcctgcgtacgactcagggtcatcatgggtgccaacatcgccgggatttacggagcgcaaatcttccgccaagacgatcgccctcgatacagacgaggtttctccatcaacatcggagtactcactctgggtcttgtactggcgacatggcgatttatcgacgacttccgccgccgaagaaagggcaatgagctggagaatccttcgggccgttccagcagcgaaaggcaatcggaggagggcgaacttgcggaagtccccgtgatggacgaaaagggaaaaggatcatccagactgtcggatgtggagaagaagactgccctgtgaaagtggactgtcgtttcgctgtagtttcaacctttgaataatacttatcccgaaatcccctatatgccggtccgcctaccgatgtctaactaacagagacgggtgctaggaaatccatctgttccaaagagtctctcaagatttaacatgtcaatgcggcgtcttcggcgttttcctcatgatcgtttttagagcgagaaacgaactctgcaccgaatagcagatgtggataaacaggagatggaatgggatatgcttccgattaaaaacatccgaaacggttgtccaggtttatccgaggaatcggtgatcgccgtcagttgacttcaggcatcggtgaccctagcttgtcagccaaagaatgatggtgatagttgggtgtccttgtcgccggcggcaactatcaactttgccatcctctgtgatacgactcgttgtttccttcacacagtcttgtcagacatacgaaacatagccttcctgagaacagtcccggatcaggttccgccaaaatgacgcctctcgtgcaccctgcactcggacccattctaggggaggagcacgatggcgtggtgatataccgggggatcccgtttgccagtattccccgtcgattcgctcgagcggtgatgcaaacttcgctcgaatctcgatggagtgaagacgggacgtttgatgccacgaaaccaggccccacatcgattcagccgtttcattctccttatcaagatgcggtcgaacagtccataccgactgatgtgatcactgccgaggaagggaaacttcaaagcgaattcgattgtctcaatctgaccgtctacgtcccgacgctcgctcgaacgaacgatggtggaccaacggggaatctaccggttctggtgttcttgcacgggggcgctttcatatggggctccggagaccggtctttttacgacccaaagacgttactacgacacgctgtcgaggtgggcaagccgttgatactggtcacggcaaactaccgcttgggagcattgggctttctccattcatctaaagccaaagatgccgagggggagttgctgttgcctcccaacaatggattctatgaccaaaggatcctcttccaatgggtcaaggcttacatcgagggatttggtggagatcctgccaatatcacctcaatcggtcagagcgccggtgcggaaagtctgagcattcacaacatgctgagtgtgtatgctgaaatgccatcagaggagaggccctacctgaggagcatagtcttctctggcagtctcttgtgcatgcccgcaatgaacgctgactcgcacgagttcgagttcaagcggatcgccaatcagttcgggagcaaacttacaggcaggacgtctgcggaattggctcattacatgatcaaccaggtcgacgtgaacgagttcagggacttgggttggcatggggcaccctgcctggagacggagatgttgccgtacaaggcagcgaccctggaaaccattttgaactcgggcgcgaacgtctctccggccgataatgatggtcacagacctactgagcgttgggtttcggagcagatcgtgagctctgcaaagtttgacggaggcgtgacataccacgccgtcaagtcggacgaaagtcgtaggcatgaccatacacgagcgttccgggaatggaccatcggagcgttgcaacgatatgatatggaaagatccccgggatctatcgccgaggacatcttcactctctatggtatccatgccgataccgacgacgacacctcgctcagagcgatcaaccagctagaaaccgatctgagctttattttgccgactatttatgaggcaatggctgcggcgcgggacacttcggccaaaagcaaggtcgacatccagcagataccaagtgcagatcccgcaaccaagacgtatctccagctctggcaattaccgaacccctttgatggtctgcttgaagctggtagatgggcgaaccacacttacgacattgtgtctttcttcggcgcctttgaggatcggctcgatgtggctcagcaattgattatacgtgaatggcgagcgaagctcatggatttcatctgtctcggtggagacgcgatgggttgggcgtcatggacggaaagcgatggacatgcaacgatcatcgatctcgatggcatccgaaccgtcaacaaggatcgctatctcgggcctcgcactcgcttgggccagctcgtcgccattggtgaacgcatcgacctgttttacgggctcgaccatcttttcgagatcatcgttagaccgtatctcttcaacaacttcaagtgagagtaggcatgttgacaatgtaccgagatcttgtagagttcgcatcgcttcgtcgagtctaggtatttccgtcgaactgtattgcggggttcaaggtctgtagccaaaggtatatatctgtatgtgctgaagcatggtgttatcgtaataacatgtagtcccgaatgatgagagaagaaattaggcgtatggtactagtcgcttcagggtacgggtctgcgaagtgagatgatacatctccgaatcagctctttgcactgcgcggctggtccagcgtcactcacctgagtcgctgttgaatacactgtccggccgagcctgcttatccgccaagaaggaaacgaggaattcagatgctgcttcccagcttgtccctagaccaggcaaacggtaataggttagaggctgactggatcgctgtgtcgcgagaagcggccattctcaggagcctgtacgtactcgcttgaactgtattcaagcaattgcacatcattcgtcagcaagcttcaaccgccattgtttcaagacatgacaacataccgatccattcgagatggctttccaccgcttcgctgttcccttgtgcgtcttcaacttggtctccaagacgctggaagatgtgaaccctcgtgtcggcgcaaagaggccgagcggcgtgcgatttgtcagaacgttgcgtagaattgagagcatggtgtcgacttggattcgaaaaacggcttatagatgtgtgaggtataggagctataggagataataggcaagtctcacattgaaagtgataaataatcgtcgtgaacggctgatcaagattgctaccggtcaggaagtttggccatagacttgccggggacctggttcgattccagtttggccgctttggatcacactgggtatacgtaaaacattgcaccaacgaccatctatctacaaggacttgcatatcgaactacccaattttgcctgagcattgcagagggatatttctactggcatcgagatgagactcgcgacgcacacccctgcaacgtataatcattgatcagctcagtcttggatagtacgcgtggcaactcacccagagtgtctgcgctcccacacgcccccatgcgaaaggccttctgaaccctccgtttggcattatcgggttcttcatctccttctcgacctatgtggtaaaaggtcatgcagtacgctgcacctcccatcaggccttcaaggcaaatgagcagaaagacgatggtgatcgcccggtccgatccctctttcgccattccgatggtttcgacccggtggcccgccgtagaggtcgtgaatgggtgggtaacccagtgccaccacgtctcggccgcctcggtatgccacacccgatgaggcttgaactcgggcgaagaaaaagcgtagaatttggcttgaatcgtgagcaggccgagaataacaccttgtaaaatcgctggcagtggaagtagtagtcgaggaatcggtgggactccaagtgataacgacgatcgtgagagaaagacgaaagactggtaggtgagtgcccaaaaggggtagtagtcacgagtcgtcttgaagaccttgcgccaggcacccgtcgtcggtggaggaaatgcgaggactggcgtgataccctagaaatttcaaacatgctcaattcttgtccacttcggtgcgtggaatggtgcttgaactcacagtattgatcacatattcgaagacgtagacggcaaagatccaaaacatgtatctcatgacgagcggcttgacgagctcgatcttctcctgtgtcgtcaggatgacttcggttggcaagtctagtttcctcggatggtactccgagccatactcctcggactgtctccgtatcgagacttcactggcatcgtcgtcggccgcaaagatgggttcatagtggtccacctcgagtttgccaagcgattcgaagggaggtagcagaaggttcagaacagcggggaacccgatgggtaggatgctagccaggccgagtcctaacctgactccgaggttccgcaaaccccaccagagacctgctccgacgagtcccgctgcgcctgtcccgctcgaccacccgcccacagcggtcccgcttaaggaagccgtaggcaagaccgtcgaccattggaggaaagtgagctcgccgagtcctgatgagaaggaagcgattccgatcccaatcaagcgcatcgccgtcgagttgaacatggcgatgacctgggacgtaaaaggtgttgcgatttatctgctctgtctctcatccgagattgtaacgacaactcacgatcattccggtccaagaacaggcggtgcaccaatatacccttttcctgtacctgatctctcccttgctaacgtagggccacacagccttggcgatgagagcgggaaagatattgaagaatgccacgatccctttaggagtgctcgccggcacgagatccagggcggccgagaggatgatgacgtacaagacattgttgagcagtccaaagcagaagaatgacgtccagagtctttggcgggcgtacttcagaggtggtgtcgacttgtcgtggttttgcgacaagtaggagtcgtgttcttcgagaaactcgtcgacccggtcctcggcgtattcttctgcagcatgagacatgctccggccggcagatagttctcgtagggagatgacctccggcttgggggatggcatcaagcgagcgacagatgtgggatcgtcgactgagaggtgagaacaatgtgattgaaaaagaaagtcggcgatgcatagcagtcgttttgagacgccaggagctcattctcgctcaaaccggcgtgcccggctttgaccgattcgtcgagtcggtgacgagtggctagctagctcactttacttacggccccggatttcaatctagacgaagttggactctcgatcgcacacgttcgattgcaggggtatgctttgcgcaaagatcgcagttcgcacggaaggctgcccggaaagtaccaacacaacggggtaggggccaccgcggcgcaaaataaaggctaggtcccaaacaatccgatcgtgaaaaagcagtactagatactcgtcacaagtgggaaaaagaagccaagacgaggcagagttctatctttctcttctacgattccaatcttctacgagatccgtcctcttgggggatgtgagtagcgtcggtggttcccatttcccctttaaaacattcaattcccatctccctgtcacccggctcgtctgtcggcattcctcgtcatttccgggataatccaggtattgtcgagaccccaatgataaatcgagtagaaagaggggatcgagcgtaaaaagtgttgatgagatccgaaccacggtgtctcgcgagtcggtcgtgtaaaatcgaatcgatctccgttcttccctttctccttccctctcaaagaccagctcgtctacttggcgtacgaccaaacgtttcggagggctagaaaaaatcacatcaagcacgtcgaagtcgagtcagttcacgcgcccccggccagtcaaacttggcgaacccgcagccatcgactcacctcccttctgggtagcgatcctgttgatcgagtcatcggcctcacccatgcttcgtacctgaccgcaaagagcgatggtggtcgaggtcttcaaggccttgccctcggcatcgacgtcagcgatctggatctggatcgaggcgtggtccttggcggtgatgagtcggtctgtacgtcaaggagatgtcgggcgggtcaggacgggtcggtctttttcgaaagggggacaagacggggtcgtgaaagcatgacgcactggtggccgaacactttcgggggacgtaaaggtcaacgagttctccctgcgatgattgaaatgcgtcatgtcagcaacgtcgtcgcgagtcagatcgccagggggtctgggattcgacgttgggcgaaggggaacgggtgttcatcgtgagggctgataggcgagattcttccagagcgaggtgtcgacaaggggaatggtcgactgtcgtgtaggtggctagtttgttgtgcgtcctcgtgatttgacgaattgtatcgagttgctttgtcccatttggccgcggtctgccttagttgcacttagcaatcacgaggtcaaggccatccgctagttctccgccaagtcccttcctcatcgacccctgcatcctcgacttctttcggctttgccttgtccagatgagattcaaccaacttgtccgatgcggctccaggatccaggccttctcgtctgacaatgagtccattgatccacttgctcgtcctcggtagcctgggtttccctcccctcccggtcgaatccccaagatccccttggctccagacagcgcgtccttacctggtcgttctccatttttgatcgtgttctaaattaatttgaatcgagatgaagaggaaaagggcaaagggggggcgggtttgaggtgtgcgtaaggggtggtttggatcaggtcgtttgatgaggtcgctggtgattttcgcaagtcggagagctggtcactagggatgaaggctagagagaggctgacacgtttcctcgaaagtcacagtcagtagcagtagcagtcggggcatcccccatcccattgcgtcgctcctcggctcttccctcgtcgagaccttccgcgcgcgaaggctagtctagggaaaggtgtctaggacaacgctcggtcaaagtaaaagcgcgtcaccgtaatgcgcgcctgagtcaagataagcgcgagtcagggaaacccttcacgcgtatgctcgcgcttctaatcaccgactgttcaatagtccggcttctggatcacgtcgataccctatcatcacgacaacgacaagcaacgcaagcgtatccaatttcatatggaagaactttccggtccgctatgcgtcttgcattgcaaacctgacgatcccgcagtctcgacgaggagcattgaagcatcctcaacatatcacctcatcgccatcgtcatgacagcttgcatgtcgtagtcaagtcgccaattgaaatgtggcccgccatcaattcgtttcaactgtaaggtagccgtcttcgcatcgatcgtgtgggcgcggtgagatacgtgtgatagatgtgataggccctaaatcgacgtttcacatggccctcccccctttcctagccatcgctcatgtccatcggcatgactagatcaacaattatacccgagccgggcccttccggttgtttgatcgcttaatgaatgaaagttcgggctgattccggtgatgcccccgtgaccccccctctcgtttccatcgcccgcatgggctcggctaattcgtttcacgtcagccattctccaaaaccccttcgtgccccgccgcgagctactgtgcccaaaataaaccggtacctacccgggcgttttgatgacgtaggccgaggtgacctccaccttttcatcgagtccctctgcgaccatacaaacacgacgacgtccattggctcgaaagcgattcagcgatcaggatcgacttgtcagacgaatatctgaacgagtatcatcgtgatacttggagatctgggttgagagccaaacgcaaggaaaccagccttgaacccttagaaacgaccttgtaagacgtgccgacgaaactcgagaaactcacggaccataaactgcaacgagcggaacgatgcctgattatcccaaagagaccagggatcctatcgccaacgtctgggtacgtctttcatccacctgtgttatgtgatgccgcgcgtgctgacctcgtacatacgcatgtagggtgagaggaccccttaccacggtgaaggacaatggcccgtccgcgtggacgaacacatcgaggctcccgtcgagaaatgggtgcagagtgcctgtgtcatgtgttccaacggtgagtgcctctttcgctctactcaaagcgtgtcagcggtaagctcatacgccgtgttcggacgtcaacaggttgtggagcggatataggagtcgcggatggcaagatcgttggaattcgaggaagagcggtcgatagagtcaaccacggtcgattgggacccaaggggatgtgcagctgggaatacaacggacaccctgacagactcaagacgccggtgagccgtcgcttagacgtcacgatcagcaggcggcaacacgctgaaccctggaccgccttgcggtgagatagctcattcgaaagcagggcaagctcgaacctgccagttgggacgaggccatgggcctcattgtcgaaaagtcaaaggaaatcatcgaaaagatgacccctcatgccattgcattttacgtgagtcgtcatcgcgatctgcggttttagctagtgtcaagtcaacgtgctgatgacgtgagcaacgcctcccaccagacctcgggtcaattgctcttggaagaatatcacgcacttgctatggttggaaagggtggtctcggaacgctcacaatggacgggaacaccaggttgtgtaccgcgaccgccgccactgctatggtgagctctgaacccgcatcggagaggcgtcgctagctccgttcgctgacgcttgtccaattacatcgtctatagcgagagtctttcggatgtgacggccagcccggttcttacaccgacgtcgacgtgaccgactgtctcttcatcgtcggccacaacatcgctgccactcaaaccgtcctttggtcccgtatgctcgatcgtctgcacggtcccaacccacctcgatgcgtcgtcgttgatccgcgaaggaccccgaccgccgaactggctaccgttcacttgcagccagccgcgggtactaacctggccctgctcaacggtatgcagcggctgatgtttgaacgaggatacatcgacgaggactacgtcaagaaacatactattggagtcgaacaactcaagcggatcatcgagggatataccccagagagggttcacgagatcaccggggtccccccagacttgctgagtcaagcggtcgacgtcattgggaccagcaagactgtcttggctactgcactccagggtgtctaccagagcaaccaggcgaccgcgagcgcatgtcagatcaataacattcaactgcttcgtggaaacatcggaaagcccggtggtggtatctaccaggtaggcgcgggagatggggctgtctcgggatatagtgctgataccgacggaacgacagatgaacggtcaacctaccgcccagaacaaccgagaagctggttgcgacggagaataccctggtttcaggaacaacaacaaccctcgacacatggaagagtaggcagtgtggcatgtacgacgacgaagctacgacagtgacgctgatgagggtatcatatcacagcttggccaaatgctggaacattgagccccacaaaattccttcctggtccgaccccattcacgcatcgtccatgttcgacctcatgcaagggggtgccatcaagatgtgctggatcagcggtaccaacccggccgtatcgttcgtcaacctcgagaagatgagagccatcttgggcatgcccggtcttttcgtcatcgcacaagacattttcgagactgagaccacccaattagcggatgttgttctccctgctgccatgtggggagaaaagaccggctgtttcaccaacgtcggtacgtcttgcttcgcatggccaggacagtgttggcgcgcgctaacgactgcccgcgatatcgatcctagaccgaaccgttcacatcagtcacaaggcaatcgaacctcccggtttggctaaggtgagtgcaccgaggatgggaaagaacgaatgacattgccgacaattttggccttccgcagagtgacctcgagatcttcctcgactacgcacgaaggatggagttcaaggacaaggatggcaagcctctgctccctttccacgattccaagtcggctttcgagcactggagatccaccaccaagggccgtccctgcgactataccggcatgtcctacgacaagttgaccggaggatccggaatgcaatggccctgcaacgcggaaacttcgcccaatggtaccgagcgccttgtgagttggaaacatcaaatgtcccccttcatttacctgcgcttacgtcatttttgctacaccagtataccgatggcgttttcatgaccaagcctgatgattccgagtctttcggtaagtggtatctttatttctcgcttcgccatgccagagcctgacctgaactttgtcctgcaggacatgatttggagacgggaacgcccattactcccgaggagtacgctatgatgaacccggacggtcgtgccatcctcaagtcttgtcactatcgagtgccatacgacggagtcagtgaagaatacccttaccacctgacgactggacgaaaccatctgcatttccacacgaggaccaagactggtcgaagcaagcgattgaacgatgcggatcctcatccgtacattcaggttcatcccgaagatgcggaagacctcggcgtacaggtgtgcatgccttgccaccccggcgttgatagcacaacgctgatatgcatctatcatacagaatggagactatgtcgaggtaaaatcgcgctacggtgaatgcgaattgccagtcaagattggcaagattggtaaaggccagatctttattcctttccatttcggatcggtggtcgacaattgcgaaggcggaagggcctcccttgctaacgagctgacgcagcctacctgggaccggtatgtttccgatttccagatggtcgacctcgtcatgacctcacaccgtttctaacacttggcatcgcagcaattcgaaacaaccaattttcaagactggtggagtcaagatcaccaaggttaccggggacaaggtcgcgatcccttcgaagcagaaggaagcggtcaggcagatggagagtcctgcctattacgaagcccaagccgaggatgacatttccaagagggtcaggcacttggagggtgagtagagatcgcaggtcaggcaaattcactagctgactctggtctacagattacatgggtttgtgggacacgagcacgaaagaaatcatcgacattttggacaccctttccaagcgactcaagaacgagtgagttgctccggtcggccggcaactcacgtggcacgagggctcacgcttggctccgattcagttttgaaatcgcttcaggaatgttgatcttgaaagatttcatcacccagtcgatagacgcattgaagcccttctccgagaaatacggggctcgagaccaagaagccgagcgtgacgtcaaagcgatccgagcggccctcttcccggattcaaggaccggtaggccgcagccttttcccttatgatctggcttggaatcgtcgtgctcattcatatcatgcgtcaccgttcctgcaggtcacggatccttcgaattgctcttggatgttcaaggactgtatacaatgctcgggtgagtcgccagcgactctcaacttttcctagaattctgctcatgtcttggccatcatgaagaatcaccaagggatacttgaccgctctcctgcccgtatcgaaggccgagcaagacaaggagttcaaggaagcagtggaactctcgcaagaactcgttcagcgcagcctttcctgggcgcactctcagatccaggtcaaggcggttcacagtctgatcgtgcctgcccctcctatggccggacatttctgatcggtttcgtgtaacaagcctgtatccacccagctcaggatcatgtatgatcggtcgacgatgtgaacacaagattgtactgtatgacctatttctcttgcgactttcaagtacaggatcgttccaattgtacagatgatgggaaatatcctgccggtgttccccttgaatttacttgcagagctccagacagctcaaacagtcttgtcgacctgcagagcaggactgggcattactcgtacccgctcgggccgcggccgtgggggtctgctacaagcgcaatgatcatgcacccaagcggtcgacatcttactccgtctctccgcctctgcctcgtaagggggaagagccaagttttcgggagtgcaagtacactaaacacatgatgaggtcagcggatcaggccaatggccacatttcatggaattcgagggtatttaccgaggacagggtgacattataggtcaggagagcctttctcagctctcccggaccttctcttgcaagttgtccgccgtgcgagtcctcgttccagacggtgaaaaagacattgatagacagttcgtgtgtgactcttactggtgtcacggtcctgtcgaaagagggacgcgagcgcttagctttggagtctttgttttcatacttcgacaaccgaaaggcgcttcacttgccctggacatgttgttggtcttagtttgttctcgtcgggcaagcgaatccattcatcgacttccatgccttccatgtccttgtattgctttgggcctggaaccgcctcaccttcccaaagaggctctgccgggcctcgttgaccgtccggtgcacgaatctcgtctgacgctggaagcttccccttggcgaagaccaggaaacgatcgacaagtggaggacgtggtttggcttcctctttgggatcagccgaagagatggtgacgacctgattgatatgaaaccgaagggcccagacggatgccagaaggtatgcgttggtgagcgtaaagtgaacgaccaactctccaccgacagtgaaagcatccgtgttggctccccactcgacggtccctagaccatccaatgtcttgtgaacgatcagatcgaggggtaaagggctgttgtccggtgtccatagggggatcaagaggatctcggacgaagccgtcatgttacctttcagccaggtcgtcttggccaaacgatgttgcacggatgcatcttgaaattgtgagggcatccgtgtgtctgcgagctgatattgaaaattagccattagacctgtatacttcggtgtgctacgtcaaacatcgacttactggcgacgatgttttgagggggaccaagcggttttgagatggcgaatcggtcttcctagcaaatgacaatgaggggccctcggatcctccaactagcctggcctcaatatgatgaaagactctcccgaaccgggtccgatccgttcccgccaaatttgagggcacgatgaaacagtattcgaacctgggggcccgatccaaaacgacgtctcgaggtcaacttcgcgcgcgaagggtcaaaagcccaaaatggccatcgaggagacgggaatgacttgcatttgaggccctgcatcgatgaggatgccttcgtcgccggaaccggacaactccatcacgtttcgatgcaagatgacatcccgccattgctgacctggagagtgcatatttccgacctgagtcaatgtgccattcaaaccagcgcttcattccggcgggaccgatcgacgcacttatctgggccgtcctgttgacctctctgttgtcccaccccttgaaggcggagggattctccagctgcttgttcgaagctggtagtctagctgtcgtgatatgttccacgtgtagataccgagctcgtttcggtttgctgagatgcacaatcacgagtccgctcaggatgcaatcgtttcgggtcgaaccgagcgccgtgtattgatccagtggaacacctggtggtggtggcctcacgtgttgtacaaagtccgaagtcctgacgatgttgatcgtattcgggttcgtgaccggtaggtctgggagttgattggtgataaccatggcgaggtcgatattttcgggtcgaatgagctgaacttgaccggtttcaattccgagaaccgttacttgactctttgctgatttgttcaagatctttcaagctatgcagacgccgctgtaaaaagtcgtatcgcaccagtactgagcatactagagacgattctaggcttgaatttgtggacagagtaaagtagattgtatgattacattagacgggagatgatttacagaaaagtggcctttcaactagcttcgaatgaccggctcgatcgggttttcggatttgaccgaatcgaggtcgagctcgtcaaggtggtggacgggaaaatagataggtcgtcctcatcgtcttcaaacaatacactcgactaaaaatcactagaaaaatctcgtagtcacgctttggcctgatccgttagaccatgtgagattcatcccagctggtagagtaggttgccacttttttttcagcgtcggatcctgtcgccatgtcacctcaagacaaacagaatcggacgtcagcttccaatagtaatgccgacaacccgcctccctttctttccctgcctcgatcgagatctggcacaacatcttctatccaatcgatcaattccatagcgacactgtgcgtgccatctggaacgagcggaacctcgcagtggggtcctttcgctccgggatcagcaagacgaacttcgatggcgagatacggcccgcaagagcggtcgacgagtcagagccgtcgacccagtctgatgtcaatcaatagcctgaatgggcccagttcgagcgggacagtttccaagactagcgtccgaggagtagcctccaggtcccgctcgaccccgctatctcctgcaggtggtctgccaggctgggtcgatagcgatcatatattggactcgacagtcagctcgcccacacaggagatacctcctgtcgaacatgaagagaacagtcagcaatcgacggcgacaaccgatctcaggcagtacacctacccagacttgaaacagagatcccctttggaaaaagcgttgttgcactccctcgagatgggcagcggagatagcaaggaggagcagcatacgctgcgaacctttgtggattccagacgagagacgctgggcgaatgtggaccaagcactttggccgataacaagtcgacatgcggtcaaacgatgcccacgatcccgccttcaactgaggcagtgccgacctccatgtcatccatggtcatggatgatcgacctctcggcgaagagctgtcaaagtcgataggaagacatagcatcgagacgtttcgaactgctcgcgcaacccctttgaatggttcaatccgagagaaggctccggaacgtccgacagtcgagaccgaagaacctctgacatcagaggatatggttgtggagcaggaggccgccccgaccgcgacaatggcaccggccgataccgaggtagcgcccagcagtatcgtcaggcgcctaggaacctgggtctacagctcgatcccgtctatcggaactggtggggtcccgaccggagatgcagcttcagagacgccttacgagggcgctggtgggcacgaagtacgacacacgaagtcgatccccgataacgcctcccccgctaacgggctcctatcggcgggtgttgaacatggcgacgaaagcgatcttcctcgaccggcggcaaacgaggccgctgcactcgagaggactgaccatgatccggcccttgtcgggacgaggcagacgcctctagcacctgctggttggggggatactttccgctggcgaaagaccgtatcgtctccatcgctatccaaagcaacgtcagctaaaccaaaaccagaatacgtccaggaggaacctccagatccggcacgagacgctacagtgggatcggatactactgctggcgattctcaatcccgatcactggctctaccttctacgcagacgactccacccccagactcgaccaccagcccgatcgagggtagcgtccttccaaggcctccgcaacagggctggacatcgtactttcgctcgaatgtggttcgagatcctcttgtttctgcgttgtcagataagccccaggtttccactcaagtggagatcctccccggcgcttcctctttctcgatcgatgcggtctcagttgcagatcctctcgcgaaaggaaacgccgacataaatgtagctacaaacgtcggtccgaacacctcgtcgcggtggtggttccgtaaaacagctagtgatctgcctgaccagagaccgaccgcacagaccgatggtcacatacaagacaacacgcacctgaccggtaccacaccgtctcctcgaaggtcgtctatgtctacgtcggaactctcgtgtcctgatccgaagccttcacgattatctgaaccgcaccctccacgcctcaacgcagaacggacggtctctagtgtcgcgcggaaaagcgtggttgtgccctcctggtccactacctttggcagaccaccaagatcaggcgcaaagttgagcagcagtgacattcgcttcactgagagcacggatccgtcatcgagtctgccgaaagtcgacaatgacgggaaagcgtgttggaatggcatcaggagaattgtgataattggcgttcacggatggtttccaaacacacacatacagaagtgagtgcttaaatgccacatccttcgacttctcggctcaatgcctcttgacagggtggtcggagcgccgcgcacctccgggtacttttgctcgatgatgggacaatccgtactagcagctttcgaagaagcccatggtatcggtgaagaccaattggataagctgacttacataccactcgatggtgaaggcggcataagagaacggactgacaagtgagttccagtgtgattgtaacagtagcctctggcttgatgcgttttccatttaggttgttcaatacctatgagaccagacccgaatgggtcgccgatgttcagcgcgctgatgcgatattcgtcgctgcacacgtgagtctatcctgaaagactattttacaacaacgtgggcactcacagccagtcactgtctagtcgcaaggttgcatcgttgccgctcacctgttggctcgcatgtttgcaaatggacacatcgccgcgccatccactcccatcgagatgctactggataagcagccagtcaagagcaagagcacatcaacaaatatagacgccaactcttcccacaagcccgcccaagtcgctctgttatcgatgtgtggtgttcacctagggccattctacaacagtgctacatcgaccgtcatgaccccatacctgtggttcgagcatccaagcgctaggtgagctacagcgaaagcgaaatcgagcgtggggctgacgcctcagggttgataagggagctgttcgattttcaagacacctcctcgagagtcagccaggagtatcaggagagcctgaagtcgatccttgcgaacggagtgaaggtagtgctgttgtcttcgctcgacgatcagatggtaagccatgcccccgcctcgtagtggacaggagtatcgatactagcttcattgtgagcgcaggtacccatttacagcgcatcgttctctgctgctcgccatccccggttgctcagagctctttacgtggatacctccatctcaccctcaaacgattttatactcaatgtgatcaatctaggcatgatgatcctcaatgcaggattagacgaccaaggtctaataagccacctatccgaagctacagccggagcttggcgtggcatgggccattcttcgccatatgaggatccaggagcgtatgatctgacagtcaactatctattgaagacgacgaatcctgaagcaaatcccctcaaggtcgaacacttcggcgcccgtgacgtgaggaacgactacgagctaccttggatattgcgcggtgttatggatgattcaaaggtacaggagctgtttggagcggagatcaaggcattgaaggagaccgtcctgtcgtggcagccgaacacgcgggctctacgggatatcaaaaagagggcgagtccgcctcgaaccaatatatgacagggcaatagactgacacttgcccatgtagctggagccaatggctgggcgagccgccacaagattatatcaacaggctgccaggctgcgaaattcaccatctggcctctctttagcaggcggcacagaaagcgacacgagcaataccgttgtgacaggttcgtgtcgcttcaaaggtgtgctttacagagtctgcgctgatccggttatcaatcaggtttgaaccgggactggtagacccgaaggtaaagtgtagaaatcatagaattattgtatccttgctcccactcgttgctcttcaatcgggatgtattcatacatgtgcggtcctttcccgccccttttattccgtctccgactccagttcttgaggtgagatggagagctcgtccccgccatatatattcttgctcggctgccacaccatgacgacgttgtcctctgcggtagtcgccaggtggaaccgcttctccgcgttaggacaccacgacaggtcggtcggacggttactgtgccccccgtgaacaaacagtagctcggggggaccatcctcggcgtcgtccggcgtttgctcttcaccaattttggagacatcccaaagatgcacacgtcgatcggtcgaggacgaggcgaaaatagtcgggtcatgaggagaccaagcaacttgtaggacctcatcgtgatgggcttcgaacgagtgaagcttgagatccagcctcctgatatcccaaagggccaccgtctagaatacaggctgtgagaaacacgatctgatgcagtcgaagttgaattccccactcacgtgatctcccgaaccagtcagcatgagcgttggggatgccttcgaccatgcgaccgcgttgatctcttccgcatgaccttcaacctgctgcgatggcttgttgtagttttccgaacgggtatcccagctgtacatgcaatgagagcccttctcatcagcttctgggtattctgcatagttgatgaccccctgttgccttacatcatcaatttcctatcgtctccaacagatgcgaacatatttgcatcttcagtgtgccaatcaacatcctgggaccgatcacttgtcagcaatgcgaactctccacatatcggattgacagaattcaataacgtacttccacaacggcagtatgaccacgataggtcctgagagggtctaggtggttgctgcccttctgataggattgtacatccctgcgatcgcgtgcagcgatgtttaggggccgcggtgatctctacaatgcttgcgactcaccagtggcagactgtagtgtcgtcactagcgctgagaacatgaccagtcttgagcgtactccaactgagtccgtatctgcaataacgagaggtgcgggttacacgaagtccggttcgtattcagtcgagcgagagatcccacacccacccctctttcttctgtcctttcaacttgatatcgggacggcaaattccatccgtaccaggttcgctagaatgcttcgtcctatcgaagacgtaaacgtccccgctgacggttttagtggctataaggttgggattctgaggcatatatcgcgcccggttgacctcgttctgatggttgatacgctgaatgactcgcatacgagccgaagaaagggggttataatctccaagttctatgaaccagaagccgattcagccgaggttgagcttcttgatagaccgtgacaactaaacgcacctccccgggtttcgctgtaatcagctagtacatcgaccctcttgcccttgttacccgaggtatctttggctcgatcttgggtgacgtcagggtcttcaccttcgatgcctgcatgagcctttggtagagtcacctcaaccagcatcaagtagtcttttgccgttcgcgatgtgtgtgtaccgaggatgagccggtgcttcgtaaagttttcgccagccggactgtcacgatggagtacagactttcagggcggagaatcctctcaagatcgttgactgatgacttacctttccatgtccggcagccattggcacgtcagactgggccagtccaatgcgtgagacagtacagtatcatagagaaagggcgtgttctttttccagatcttgtactcctgtgaagatcaatataaagatagcccacacagttaggttctgtcatatacgggatagcgtcgagacgctttacctcgttgatcctctgatattcgtctggcttgagagacgcctggtcgaccgtgatgccctcgtcgatgtcaataacttgatccgctgggaaagcagacatgatgatacggctaatttgacgggtttctcgatatgtgggttggcgacgtcgaattgctctcgaaataggattgaacagcgatgctgggggatcaaacgtgcaggttattggcaagattacccaggactagccataacacactactcctacgctactactctactactatcctctggggaaccgtctgtctggccgtctctctctctctctctctctctctcccggtcgcggtcgcgtcgagacatggcgcgtttttgcatccgtagcgaattcaatctaagcctggtggcaatcaatcggaacgtacaacaactgatagtagtataggtgagggagagaaagaaagctcgcgagagaggctttgctcgggcgcaggatgaaaaggtttgagagcgaagatacgaaatggtacggcacaaaagatgataatgagttggcgagcttctttctctagcctaccgagatgacggagactgcctccttctgagcttgccgagcttgggttcgaatatccttattgtcgattgcgatgctctatcggtacaagtcggatatcaacatgtcgtcatcgaaacctgcgcgcggtctatcactcaccttggtgcactgatcgcaacgtgagttacaaccatcaagtcagctttcgcttctcacacatgggacttggtccagacgctactcacgttgttcgtcttgtaaatccctaccagtcgatgactaagctcaaacatgtcgtttcgcagcgagataatgatgctggagagaatcagacggtcagtaaggctaccctggcgacaaatgcgacgacctctctcacaattgggctgcttcggttttcgacttgatgtaattagcgataatcgaaacattccggaagtccagcgcagcgtcaatctcgtccataaagtagagtggcgtgggctgcgtcacgaaaggagggacgcgtcagaaacttgaagcttgcgtccagttctcgatctgactcaccttgaagacatgcaaagcgaaaaccaaggcaagcgagctgagagtctgttccacctcatgtcagtcgccaactcgatcgctcaaccgcgtgagatgctcaccttctctccaccggaaaggttcgagatattcttccagctcttcttgggtggcatgacactgaagatgataccttccgaaaaggggtccatgctatcgaccaactcgagttcggcattgccccctagagtaatcatctatatgggtgaaaaggtgagtcagatcggtagtgatgtgcgcgtgaagacgccactggtgccaacgtacctgatacatctctttaagcttgctgctgattgtactgaagcctaccatgaactcttccagtcgggttttacgcaagtcgtcgtattgctgtttggcatggtctctgtccttggtgaccgcgtccagatctcttgctcggtccaggaattcactttctcgctttcgatattctaccagaacgttcaggttgggcttcatccggccaagctcctctacggcagtagcaatgtcttttcaatgatgctgtgtttccagcgggatagtgtaaaaatcacttaccctctagctgagtgatctctgcgttcaggacgtcccggttcagcccttctaactcgtctgcgctgtgctccacgagctgcgcatccgtgtcagcattccttctagagctgcgacgagcaccatctccttcttctcgctcatcctcggcttcgtcttcgtcctcatcgtcgctaaagtcgtcacaacatctctcgtttagtgaatggctcttcctgataaacacaaaagaaaagggcgccttactccacatgtaccaactccaattctgagaatcgcttttcccagtgacgtagcttcgcgttatggtccttaagtagcttggtttgttcgtcgatcttctgactgacttcaacttcgagtgctctgaaagaattgatgcttgtggtcttgtcttccagctcctttttggcttcgaccagaatgtcttggacgctttccatgccgatttgggcctcgtcgactttgctctggatggtctgcaggtctgaaacacatgccttccagtcgacctcgattgtctcaagttccatctcgagttcattcatcttgtcggcgtccgcggcaagcgacttgtccaacttttcggtgtcgcgctcagctttcgccttagccacctcggcttttgtgaggttgtcgccggcaagatcaatcaagcttctcgtatttgtcactttggactgaagcgctcgtagcttgacgcctcctacttccagaatcttctcttgcagatccttgatgcgagagtcgatggcggacgtttttgtcctcagcttttccaattctttcgagttatcgtcgatcgccttgtccaagccagcgatacgcttctgatctgcggtgtcgggctgggcttcattgctatcgatccaacaagaaggaaagcattagcttccgtttgcctttccatcgacatatgacggacctgacatctcgcagcctttctttcgcgttggctaccctggcatcgcttgtatccagatccatctgcagcttttccgtcgcaagttcgacctctgggatacgtttcttgatggagacaagctccgcctcgacttgtttcttggcactctgcaaggcaacgagatctgcttctgccgtgaccaactcctcctcgtatttgagtagcacagctggctcgaccgattcgccagagaacttggagctcataccccccttctggatcctggctccgccaccggacatggtaccggaggggtcaatcagctgtcctccgagcgttacaaccctccaacgcttcttgccgtatccaattctttgcgcttgttgtaggtcttccgctaccagcgtgttgaaaaggcccttgtagaaggcttgcgcgaactttccttcttttggcttgatcagatcgaatagcctgggtacaccttctggggtttcgacgggcgatatatctctggttgggagcttctctaaaaccatgatggaagctcgaccaacgtttcccttcctcagcacttcaatgcacgcctgcccttgctccactgtgtcaactaccaagttgttcagtgcgccacaagcagtcgtgaccgcgacatcgtatttgtcgtcgatcacgcctaagtctcccagccgtccctgatatcgcccgaaccatgttagccgatagcttgtgttgccatgaagttgttacttatcacaaaatacttacatggaagcccttgagtcgtccctgagttttgagcttcgtaagcgtgttcaaaactgcattctcagacttgttcgcggcgagtgacgatttagcctcgtcgcttctctgcctggccgtggtcgctttgctctttgaagactccgtcttgacttgcaacgtctagcaaagggacgcgtacctgtcaatctctgctgaaaagacagggaagggtttcgactaacttggagcttgccctgtactgattgaagcgctcgttgcagctcagccccttcctctttcagagacttgtgttcctcgcgctgaagaagcagaaaccaatgtgttctttttagtggtgaccttcacgtagcagacctctacctgccacttgccttggattgtacggtctgcaaaagctcctctaaggctacgtgggcagcatcgagggctttttgcccggctactgcctttccggcgagcaacgctttctcagaactggcaacatctacagctgactgccggctattgatcttggccacccacggctcaagctccagttgcaatgcttcaatctgagacgtgaagccgtcggtcttgtctgttgcctgcacacgtcagcttgcaaggtccgtctaacactaaggtgggggctacgcacccttgagactatcgcggacttcctccaagtctgcttcttccctgaccagacgatgttccatgtcattgatctggttacgaatcttatcgatctcatctccttgactctcgaactgatgtgcggcctctgaacgcgcatgtcgattctatgcaaggacgaacgctgtcagcgagcgagaagctccggacacactccatttcttacctcgctcaaagtctttgtcagctttttctgcttcgctgataggtgctttctcttctcagcaagtgacagctcttctttgccgaactttttagcatccttcgtaaggagatcgacgtgcttcttgacttcgtcgaaagcctccaacctttcgtcataggcacgcttgagcgtgtcgatttcggcaaggttccctgcgtttctctcctgttcagcggcaagtttggcacgatgcgcgtcctggtagtcggcaacaaccgcgtcattaggaatattcggcgaagaagacgcgagcctggccagagactgaccatcattttgttcgtgatagcgatattgttgttcagggtatgaatatggaattgatataacatggacttcttccgcgtcaattcgttggtgtcccgtaggtaggattcagcctcctgctttttcgcctatttacccagtgggggtttgcgtcagatcgcctcaagtagatcgtcattcagccagacgaacctcaaggcctgatttctcccgctcgaccaatttgagacgaccgaggcgttcccctctagcctcattgtattcgtccaccttgatttgggcctcttcgattggctgtttgtatttcgacgtaccgataatgtcttcgagatattcgagtagtccgtcctcatgttcagtggctccttttggtttcatttgcgcgatggactccacctcgccctgtgacatgcagacacggtcattgagtagcggtcagttatagacaggaactcaaccatgtcacacgtcgatacgcacttggagaatcaagaaacgcttgtgatccagatcgataccgcggcccttaagcagcgtagtgacttcactgaacgtactgttgcggtcgttgattgcgtatttgctcgagttgttccggtgagcagtcctggcaactaccaactcggagcctggcacgacttcgtacgcatcggacccaggctagtgtgaccagcatatcgaggtgattagacgtagcaccgacaaaatagcatatcacggcgacctactttatcgatgatttcctcgaaccatacttcgacagagcagctgtccaagtcttcgctaccctcggagttgtggatcaactcgctcaactttccctgcctcatcttgctagcacggtacccgaatacaaagagcatggcatcgatcgtgttggactttcccgaaccgttgggtccgacgatggcagaaaaggactggagggcgaccatcgttagctttcgtttgacggataacataaggaaggacgagctactgactttgtggaatggaccaatctcctggcgaccgcgatagctcttgaagttgaccaaagccatctttcggatcacgagccgtttcttcggacctttctccacgacgacaagcggctttggctcagcgggcagattgaggctcgaagacggctgcaagatcgacgtgtccggtcgtgagaaacccgattgtggcgtatcagatctggacgttgccaagcgaagggatttctcgactgcatcttcctcgtcgttgtccgagccgtcaacatcgtccatagattcgggcttcggctgcctcgaggagggagatggattagcctggatagtctcgtctccttcatgatcaaccttcatgtcatgatcgtcttcactaatatcgtcgtcagattctaccacccgttttttaagtgcctttcgatttggaaaatttgatcgaagattcgcattatcggggctttcaggggtcggtgtcaccgatagtctagctgaacggcgaggaggcactgcttgctcgggttcgacttccgactttactcgcgtcgcacgagtccgggtcttctgaggcggtggcgaggcttgcttgatcggaagtttcctagcgttcttcgtattcgctgctaccccagtcccggacgatcgatttccccttgaatgggtccggctcgatggctgtttcgggtcctcttcgccttcctcgtcgagcaaactgtcttcgtccgatgtatcgccctcaccctccgagacagagtcgtcctcttgtagagatgaggctacgctatttcttgtttgccgacggactcttgtagtgggttcaggtgtcggttcggcaggagccgttgaagcggaactttgccgagttgttcgtcgtggtggcatggcgactaggtcgatgtggtgaagacttgtcgtcgttggccaggctatcttgatggtcccagggaattcgaacttgatttctcagaagtactatattttatggacaggatggcggttccgcaatgtcaaggataagaacaagagtgttcgaggtacgagtagctaatgagctggtcgctagctagctagaatagatgatgtggttggtataggtacggagggtttgtttacactttgacgtcgagctagcttgtgcttcggcggcacattcaaaacaaaccctgaatggatggatgacgcgtgggaaacgatacaatgccggcatgctttcgacgtatacgggacgtgatagtgacgggacattcatcatgtctatgatctatgatctatgattcatgtataacattcctcacgctgagctcgctacccttttcctcttacacggtcgcccagtctcgaggtgacttgagtacctccataattttggactctcgagttccatcccctgccacgcccatgtccgacatgtactcccaccgcgcagtctcgggaagactgtggaaagggatcagtcaacaccacacaaaggcaggtcaatacctggtctacaagggacgattgatattgcgtacctcatgaggatgctctcgattcttgcacccggggtgaatagcccaaatttggttccacgatcgtaaacgaggttgaattcgacataacgtcctcgccggataagttgccatcgcctctcctcttcggtcactggggtgtgaattcgtcgcttcacaatcggcacataggagtccaagaatccattcgacattgatttgacaatattgaaaatctcgttcgcggatgggtttcgcaaaggctcttcgggggtcaggcctcgcacaatccgtttgccggattccccatggatttcgctgcttgtagtcaagtcatcgaaaaagatgccacccaggcctctagattcgcctctgtggggaatctgagcaagccgatggaaccgaatttcttagcacagactgacgtgtaatggtttagagttctcccttacatacataaaaatatttgtcggcccacttcttccaagtgggatagtatgcggtgtgatgcgcatcggcggcaactttgatgctgttgtggaagtgctcggcgtcctcttggtagaggtaagaaggtgtcagatcagagccgccaccgaaccaccaagcaacgggctccacggcctttcctgatgaggtgctggtcccggcagtcgtgtcaagcgcatcgctaggagtccccgccttgtccaactcgaaatagcggtaattcatgtggatcgtcggcgcgtgggggttccatggatgcagtacgatcgatattcccgctgcaaagaatggcatgctcttatccttgtcttcctcggagatttcgaggcttttgtggtctgctcgcatctgcttgatggctgccggcggaagtttgccatgaaccacagaaacgttgacgccacccttctcaaacactcggccgcccctaatgacgcaagaagacccctcgcctccttgaggtcgaagccaatggtctcgtttgaacttcggtgcctccatctctgtagcatgctcgttcggcgggacagatgcttcgagcttttccaaaccctcgacaatacgatcttgcaactccatcacccaagtgctcattctgccgagagcgaatcggtcagaaggaatttgcacgaaattttcaggcgtattgcttaccggatccgcattgggttctgtgtatgctatgtgcgtgagctaatcggtatgaccgttgtggaaattcgatattacacgtacattctcatcatcccactccttgggtcgggtcggatcatgcgcatcttctgcgtcattgacggtcttgttcctcctccgagtcgtctcaccgccgttgttcttgcgatttacgatcaggtcatcgaccgatgattcgcaatggacggtttgtggcttcatgtcggttgagcagatggacattttattagctgacggaggcttgccatgataagaagcgggccatacatttactacacctcccgaacgggctgcccagcccgaatacagagcaatggtcagaccggcagcaaagccggctgctgctcgactgtacagagtcttgttgtaattattgcctcgggtcgatgtgaccgctttacgctgagatcctcgagcagcagacgatgagatcgcgcgactctgtgatgggatcaatgtagatagcctggaacgggatatctgagcggcgaacatgatttgtcctaggtatgttgagcgagctaatgtgcgattccgtgtatcgtgtaaactagattcgtcgacgacgtgaaagcgtgctgcagcagttggcggctcgatcctttagcttggtggaactcagccaagaggtttgctatttgggacacggtttatattcttgattgacttatgtaacgattgtcagtttcgttgtgggtgactgggctcgaaacaggtaccacctcaagtcaagtccaaactgcagctgttcgaagtacaagaatccagggtgacgggcgaccaactcgatcggcagtctgttctcgctcgcgggattggccggtcgattcggtcaaaaccggaagtacgcccatagcctacaggccaaacaactgtgacttggtgagccaaatttcaggtggaagatgcatcttgtaacattttcgtaagatcaacggtcaaccacgacaacagtcggcttgggtacaatcgacatgcaacaagactactgctgcgtaggcttttcgctacttcgttcaccatgtcttcttcgatcctcggacatcccgtgaagcgtgcataccagcctgcgctatgggacatatcgttgacccgcttatggcagcttatcgatctccaacaagattaggggtggccacgcctgccgctttgagcaaattagcgaattcgacccttcctgttgcttcgcataactgcgggatgggaaaggctacgtcagtttcatgcgacgcgtatttgatccgaagcctgatgctcaccgagtagaacttggagcgatcgtccatgagaaggttgtgaggcgagtcaaattccgctatgcgaccattctcaagtagcaaaatcttgtcatagtcgatgatctaagtagagcatgacgaatctggtcagtcgcgtcatgccttttgacatccatgcatctgctgctgactgactgttgtcaagcgatgagcgatggtgagcagcgtagaattggagaactcctcacggattgttctagaaactgcgagtgccgatagagcgattcagctgcagcccacgctgtagattgaatccgagaggcgatgctcactcaattcgtcagtctcatctaccatcatagcatgacgatccgaaaatatcagcgggtcaagctacctcgacaagtccgcacaaaggaaactcacagtcaatactgtcgacagaaatgtgcagaatcgacgggttaatgcacaagttcacccaggatcagaatttcacaaggtactggcttacctggcggtagcctcatccatgacgaggatcttcggatcgcgcaagatcgatcttgctaaacagagcagctgtttctcgccctgagaaaaattgtcgcctccctccgagacatcagtttcgagactcgcgaagaggtttcggttgcgcgtcccattgccagattctgtgtgttcctccgatttgagcaaatggaccctacgcaatgcctcgaaaatggcggcatcgtcgtactcggagaagatgtccagagtacttcgaagcgtgccactcaatattgtagggtcttggggaatgatcgttactcgagatcgaagttgcgctagacctgcttgagtgatatcgatgccatcgatcttgatggttcctgaagtcggttcgacgaatctaaacaaagacagagccagagtactcttgccacaacctgttgctccgacgataccaatcttctggccggcttcgaccgtgaatgatagttcgtgcaaaaccgtcgggaggctaggagcgtattgaatggaaagccctaacagtaagaggggggcataagcgactggattggcgtataatgcccacggcttgtaaacccactgtctacctcaatctttccggcatgaggccaatgtgccgggacctgatctgtgtactcggcagcttcgaccggcagctggcagtattcatcgagacctatcatacttcaaaggtcaggcgtttcgctcaatattggctactagacggagctgaacctacgctcgacctatgttcgtcgggaaacaacattaagggtaagtaaccaggtccacccatccccttacaagtaaaactcacggcgactagcgcttgctgcagctgaacccaacgccgcacaacgaacagcagatcgttgctgacactaagcgcgaatgtcaaggcgaacccagcgagtgacgcggaagtcggggtaaccaagacaaccacaccagtgaggcccacaatggctgacgacaggagattgaatcgtgccgagacccagcgcgacaccgtccatgagaggactgtggttgatggttactcagcaaacggttgttcgaaagaaaagaccaagcccttacctgcacttgagatgttactttgagagcaatatgtacgtcagtcaagccatcgtcaaaacgaaagaatgatccaatcggcaagacatacgcatcggactatgtgtaagaagttacggggcggttcagcattggaagatgcctggggcgtccaagaagtatcacttacaatttttgtcatcctctccatcatcgaccgactcgccccgtaggctctgatcgtttgaataccgccaatcacctcgctaaatgttgcgtagaggggagagcggttgagggagtccaaacgcctcaagtcccgcgaaacggggccatataaagaggctgctcgattgtacaacaggcctaaaattactgtggcgatcatgaatcgccatcccccgacccatgtgatagagcccaaagtcacaacgacattgaggaaatagaagatggtctaagtgacgccgaaggtacgcagatttagtcgcgtcagtctggtatcctattctcaggctaaaaactcaccctgccaaaactatcggccgtcgagctgtctagcccttccatgtccttgccgaatcggttaagggtactagatcactcgaaatcgtcagggcctgctaaagacatcgccagcaattgtcaccactaaccgtcctcgcacgctagtgtcatggaagcgaatagtagccaataagacacgctccagcatagtccggtgaatcttttccgacgccctgagcgatcctaggtaaagaacagcgaatctagattgagatgcctatcattccgcgctaccatcagtcgggacgtctcggatgggtatacgaggtgaccggacctacgatagtacccagcatcgtcgcgatcgcatatagcgtgatgaaatagaagggcgaatgagttggctgacgctccgaatagctggctgaccacttgttcagaattgatctttctaaaagcggagggcacgcgccaatgacgataatcagagcgaaaaatatccagaaaagcggggatccctgagcctggatatacgttttccacgttttccaggcaatgcctccagtctgcctcgcttcatcttcgaccagcttgcgcgggggacgggacggtactgcagtttctggtactgtcgtatctttggctgcgggctggacttctccagcagactgcggatcgggtttcgggctgtcgatgattttctctacagcggatcctgtcgggtcagatttgaagagcggtttgacatcttgctgttcctcgaattcctccatatggccagcttcaacgaattccttgactggacccgtatacttgacatctccgttatccagcaacacgacgtgagccgcgaccgggacgaggagcttgatatggtgagtgacaagaataacggttctgtctttagtgagatccccctggaagagatcctccacgattgccttggttgtatgagcatcgagagccgaaatgatatcatcaagcaatatcgtgcgggctcgactgtaaatcgctcttgccagcgacacacgagcacgttgaccgccactgagacccaagcctattgaagtatttaccgcttcggtcaagtcataccttgctgtggagctctataacaaatcgcaaacggacctttttcgccaatttccgtccattcgccatcctcgaggagttccaaatcggattcgagagagcaggctttgatgacccgacgaaatcgcacctcgtcctctggtgcaccgaaaattacattttggcggagtgaggcgttgatcaagaacggaacttgagaggcgaaagccgttcggccctgcagaatccactcttcggctggaggcttgatcccgtagtccgatatggccgagacaggagatcgcggacactgtatgttcccagctagaagatctgcctctccgagaagtcctagtagcagaagggtcttgccagcaccaagtctacctgccacgacagacagtttgccgatcgggaattcgatattgacatcggcgagagtaaaagccgaattgctcggcgtgtttgaccctgaaggggcagctgaggcgtaaccggtggctgtacctgatgcgacatctctgggccacgttagagtagcgcttctcaaggctaccgtatcatccgtggtttcggtccccggcgcgacctcggcctgacttaggtatttttgtatgcgacgtagcgatacgaatccctgtaaaacagagattgccgtctccggcaatgcgctcaggctatactgcaattcgtttaaaacgctgacgctcggaaatgccacagcaggcgtcaacggcttctgagcgatcacgacgtagtgaaagaatgtcaccaatgtcaccgctacaggggttgttgcccagacccagtttaaaaccacctgcagagattgtcgtcattgaaccaaatcaaagcaggtttcgatcctacgctcacctcgatgatataattcctcctcaagtatttaagctccttcgatctaatcttcgtaaccttttcctcgaatttgcgctcccatgccatgaacttgatcatacgaatggctccgagcacttcattcatgatggcagtcctctcatcgcgagctttcatcaattcgtcctgagtatccaccacaactttgctagcatagtgattcagaggaagggtgactgcaagttgttataagcaagaatttcgcgttacgaggtccggctacgtacagatagacgcagccatgccccaaagcgcagacgttcctaataacttgtaaaggaatacactacgaacaggcgaacgcgatcagagcgtgtataagctgacctcacgaacggagactcaccttcccacgaggagctcgatcggtgaatcgatctgaattgagacattccggtgtcagacaatagtatttgaggctctgacctcgggtcagacgcgacgtaccagagaaaaggtgtgaaacgtgaagtctgaaatcaagcatgagtctttgtgtccgcgcaaaagtaaattttaattctcgactgacctgcaactcggtcgacgtcaacggtgaatagagtctgcgatttcatcgtgttaactatcaaagaagccgtaatcccgctatgccggtgtcgatgcgcaccatgatttgtgccttgcttgagacgtcctcctcatcctcctcagtttccccgacgtccagaggaacatccttactttcgccagctgtatcgttttctattgaccctccgtttccttgcaacctagcctctttcgcctcggccttggcactatttcttttagtcgccgccagatccttcttgaccaaagttttgctgaataagagcgtgctcaattgtagctttatcctattggctaattgtgtacttgtgatgtacctgtgttgtccgccatcagaccgaacctttcagtcagtaatggttaggcggcgaactgcttggcagacttaccagagcatccccacagccagatacattaacgcattgctcgcagctagaccaaagcacatcacccagccgtatcggatatttttcctgtctggattttcttgcagatattgagtcaattgctggaggaacaccgccgggaggtaataaagccctgccgtggaagcagcaagaaccatttctagcatgaacaggcctttgttggcgatgaagacctttgccaacagattgtatccctcagggagtctgtcgattctgcccatgatgcctcgacgttcgtatcgccgcttcaattttctcgtgtccccgtagacgttcttcatgtgacgaaacgcgaacatcgaacgcatgttccgctgcaaaatcggaagatcccaaacgttgaaagatgtcgccttcttcgccttgtgtagcaagggctcgacgtggagaaagaggactgtcccaataatggtagtgctgacttcaggcgtcacatttgggatccggtgatttagtgaatctgggatggatgtagcaggtgtacctttttccgcgtgttgttccttgagagaggtgataacctgtttggaatacagcttttccattggaaaatatagctgcggtcccctgcgcacagcggcgacgatgacaacgagcgcagggaacagcaacaacggttgtaatgcaatgttcgcttgcacgagagccatctcccggctggtatgtggaagaggagcaaagaggtcgttgttaccacgtgtcacggtagcatcgggaagcatcacgaagacagcttgacagagccatgtcactgagaggattgtagccatgtggactgtcgttgcccaatgttgagctacgttattttgggaaacgtgtattcctgcgaagcagagagtacagatgtgtacggataggcaaaggagatggatcgcgagggttgatgtcgctattccgctactgtggtcgcttgtgtttccaagataaaaccccaaggataagagattcatcagagttgggataagtatcaaactgatgttcaggagcttgaaacgattcatcttttggcgatacaatattctctgtcaacgaagtcagatggcgggagagtgggactatctgtgaacgtacccgtctccagaaaagtgcctcttcccccgcaatgggcacgccatccgaatcttcaggccgcaggcggtcaatgttcgaagatgcctcaactaccgagtcgtccgtattcaatctgtgagaagtctgttgcggctccaagcgctggtcatcttcatgaatcggatcttccagtcgtatgcttcctggatctgacggcccgctcggaagagtcgggacatagagaaccgcagacacgagagccgtaagagctgggaccgccaagagcgaccgatgtgcagtgtccattgcgtccagtatatgcttctcgttgattgctcagatattctcctgctggacagttccttgaccctttgatacgtttggtctcgcaatggcccttcatgaacctgcgagctgaagtttgctttcttcagacagagtacgtttcggcccttgattccacgtcgacgccagaatcgaccaagtttgaaaactcagtgacttgcggaccgattgtatggattgctaatgggttgtcggagccgtgcgttgaggtttcgagtcgttgactcgaagcaagaattcaagatcgatggacgatcgggatcatgatcatgatggcatgatggtcccaatgttcggatttggccgatcctgggcgggaaaagtttgtgaaatcgtcatcgccgcggactcgcaagggacgtctcggctccgaatctttagcacggtgactggacgaatcgacgtcgtcactgctagggatcaaggacaaggtgaaagggctcgatatagtcatttatatgcatatagaaaaggctacgtaagcagatacgttgcattgtgtaacgcaaggaccggctggacaccgcttcaagctgaaccgacctagctttctcggtgggtcagaaaacatcgcgggcacggagcgtgcgagcctaagtagaaaaacgctcaaccaggtcttgtacagctttgcccaattctgttcgagaatacgcgaatcagcagggaatcgtcagcacgatagcacctagcctcaacttacggatagctccgggctcagtgcttgcttcagcataaacacgaacgcagtcctcggtcccgctcgggcggacaaagcttctacccttttcaaacttgcgggtaagctcgtccagctcggattgcattccttgcgggctagtcaactttctctccgcatcctcggttttgaaggcgttcctatcggccacgctgactttgagcaatcgattgggcaagtcttcgtacccagcgtcccattcttccggtccccatcgcttgtgagcgagaatgacctcgacaagaagaaagtccgaaatggcatcaccaacggcctggttgatcaagctgatcaaggctcgcaactgtttcgcagccgtgtcctgagcaggagttgaaggctcaaaccgagaaagaatatcgatcgtttcaggcgagaacagaacagtgccgtgtccattggcttcaaagtagacgccgatgtcgtaccgctcagctgcgtggtgcagatgcttgaccccggtgggtacacatcgcactggaagaccctatcgaatgaaatggcacggtcacatcggttaatgtcgagtccgaggctatgcatattctactcgaaacctcatcatggcgactcacagcgttctttaggtacgcggtcgaactcccgttcgcatacgccgtctggattaccccaatcttcaatctttcacttaagcctgcttgtttgactagatcgccaataaagccagcggctagggtagcaatcttgtctccgtcgaggagcctgaatttcccctccgtccgcacttgatcgccagcagccactgagtgatgggagccgctcgtgaggtagtaaaatacaactcgatcggcatctccgtcgagggagcaggcgcgctgtccgggtttgagtatgtcaatcatggcagggggcaggcgctgcccagtcttgacgtaatcagctccgcaattgctgttcagagcggctgcatcgtcgatgtttattgcgaccaattcgaccgggagagatgagctgatcattggcttcaaaatttgaagagcggagaaaccgacgccgttggcacagtcgatagatagtggcgtgtcggattgccttccggtctatagagatgcgcagactccttagcaacatgttgccgaacagcattgtgaagccagacttgccatgagttggttgaatgcgtcggcgattttactcaagtacccctccagggtaggttcgccatacgcttgtcgctcctcgcccttcaagttcttcgccttgacggcatagtggacacagggagtagttacgatcccaagatcgacgagctgaacgctgtcttgtcccattgccttgatgccggccttcagggcatcattcaactcctgacccgacggccttgtatctctcccgcaaatgatcgagctaggctttgcgaggtcgatcttcaggctgtcaactagctgactcagcgctttcaacagttcggtcgcggtttccgcgtttgccacggttgtggcatatgcttcccaggtagggtctagcatctcgcctcgagggtcgatcagcttcgcgccgttgtcctgtcgcatcgcaaaaagcagtattgaatcagcatgtttgcgacactctgggacagggatttggggctgacctctgcagggttatggctagctgtgatcatgaccccgatggtccgtccgtccagctttttgctcctcaagacggctagcattccgactcgaagcaaagttgaagcaagagttgcacccctaacaataggtgtatgcagatataccggtaagccgctgctaaagactctgactccccgagacttgttgagagtcgcttctcatggactcacttggttctgaagccggctgtaccatagctaaaggtaactcccttgggcttgggatatttgtcggaagcctcagtgacccgttcaatggggataccgactgatgatggcatgatgtggatgctgggaaaggaggggggaacagaggtcgagctgtggggtagtatcacttgagagtgtggtacacgtgaggagggggtgatggcaatctgatggacgtgtctttatacgatggtgatatggagaagcctgagtgccaagttgatgtttggcatgaaaggtatgcgaacgttcttgctggttaattgctggtcaataataacaacccctaagcaggagagtgtgatgtgatgtgatgtgatgtgagaccacgaagtgtgccaagtcggggaataatgacgacgagcgcgagcgagggaaggggaagcaagttgatcgatgttctacagccggccaacaagcgacttgagaaggacaacggtgtgaactcgttcgataggcgatagggcatcaagtatgggatgacagaatggtaccgcgtattcgacgatatatgctcgagaaggcagacactgtatgcttaacgaaccgacattacgcattgatcgttctgcaccgaaacgcttgcttcgctcataatgctggcggtcatgcacagtgcggtagtctacctcgacatgcatcttcaatccgcatcttcatcaacttgctcgacgctctccacaatctcggcgaccaaggcgacgcatactccgggaacgtggcgctctgcgtcctcaaacgctagacgaagggcgtgtagagcatgtcgcgcttcgttgtttgggactcgcaaagatagctgacaagatacagtcaacgtgaataaggggatcttgtggtcgccgtagatcaaacctccagggacactcacattatccaaagcaggtattataacagaatcaagcatcatgtcatccataccattctgcatattaaattgctcggcttcggatggcctgttcgcgtcttgaaagacaatcgaggtctccggtgctgtcgtttcttgagattgctcagcatcgtcccgatttgcttcacttgctcgctgcaactcagtcccatgcccagctcggtgacgagcatgaccccggctggagcccccagtcggaccgagtggttggtcttgtacggcaggaggtgcatgccggattgtctcgaaaatctcattgcctcgtccgcgatggcttccctgaacgtgattcaccggacgccctgcaagcgaaggttgttcgggcagctgtggtaatggtcccctatttcgttgagaggtagcgttccaattgggctccttcgttgaaggctgacattataccgaggattcagcggttgagtagggccgttcccgacctcgaggtctcgtcgaccttgacctacctgtgcagggagtgtcgacgagatggtggaaatggggccggatggcagcgagttccgaacggtgccgactgaaagcggatacgtcatcggcccaacggtcgaggcgcaagagacaggcagagcttacagtcccacaagttgtcttccggaaggccgaactttgccctaaggagcggtggtgtcagcaaccgaatctctatgtcatttgtgcactaagaacgtacgtctggagatcgaggttgggtaaatgattctctttatcaccagtgggatcgctggcagccttctcgatcaattctgtaaggtattctttccgtttggccgttctgatgaaacggtgtttgagcaggtcctttgcggaaggtctctaatcgcatggcgatacattggagaactcagcaaaggatgtcacttgattcgtctggcacacgacgctgaccaaatttggatcccgttgcaagcacaaggagacgaattctcggaaaggcttggagaacctttcatcgagtaccggtggggggtttctaggaatcaagaagaggacctatagataaaatcgccttgagcactgtaaagagcttgcctcaagaagggcggctggatcaccttcatcggatgcagatcggcgtaaggcggttcgcccttggccatctcgatcatcgtgatacctgtttgcaatcgctcagtcagtccggtccattagttgacaacaggaacaagcagggtgtttctcacccaagctccagatgtctgcactgtacgaatacccagattgcttgatgacttcagggctctgctcgcaaagaggtgttagcactaccgctgaactcggacacaagcgaccttgctgtaccatccagtacggtgtccccacgaaagtgttctttgtgatccgaatcggtaagcagggagggaatcagcgatgtccgcatctgaacaagggggaaaaggactcactttcttcgtcatcgtcgcactgagctggccagatactccaaagtccgcgagtttcactggacgtaatcgcaagttttgcacacgcgtagcggagaactagcccgttgagactcacctccgccatttgatgtaagcaggatatttgcagctatattatcggctgtcagtgtggtagtatcgtccgcgctgccgaccttcacacgtacctttgatgtcgcggtgcaatttgttctctccatgcaagtattctagacccctcaatagctccctcgccagtatcgaaatgtactcttcccgaaacacacctactgctttcagctgtcgaaagttgtaaagggttgtatcagcatcagttatgtagcgacagtgcggcttgtcgatgttaccagatcagcacaactcccccccgagcaatactccatgatgatccagagatgggattgcttgagaaaagcaccatgatacctttgcgcgagaccgactcgagtctgagccatccttggcgatgaggcaaagacaatggtgcttacctggtgacccattcgctgtccatctggccgaggatttgaatttcgagctgaatatcctcaatctcatcttcggctgcttcgagatcgataatcttgatggcgacaggcagggtagttctcttctcatagcctttgtagacttctccaaacgatccctttccgatccgatgctgtctgacgtatagatcttcgggatcgacctgcggtcggccacgaccgggtgtctgtaaccctccgggaggagcggacggaggtagaggcgcgtgacgggtgctgtaggctgctcctatctgtgtgcattcccgaacaaagtaacgcacaaagaggcgatcagctcgatctatttttcggtttgagccattctatggacttgctctcggttcggaagacgtagctgtcacacctgaaccctgcgcaaggccaccgacaagcctcgatctcgggtgctgttcctgcattggatgaccttgagactgctggtgcagcgaccgggaagaggcgtactgcttcatgctcagggggtattgatcggttgatggagttcaaccaaagggacctcgctcgctggctactttggtgctgtgatgctactgtttgtgcgattgatgatcttgtgaccgtatgcatgagaccgaacaaggtggggtccctccttgggcgagctatagctccgagtcaaccagtcgttgtaaggcaagcggtgacgtcgggatgcaagcctgcagtgcgccaggggctgtatgaataaataagggcgactgcccgcgcaatcgaatgcagtctatggacgaaaccagcgtatgtcacgctaattcactttgtcggaaagagtcctgagagatcagagactactagaagtacgattcgacaggtaccagttatctctcacgacggaaaaagtagtaccagttgtgcctatggtatgctgtgaccttttgcaacccgactgattgatggtctcgctcgaccttggcccggaacgttgatgatcatgaactgatgatgatggacgctcgctcgctcgcgacctcgatcaggtgtttgttttgtttgtcgtgttgatcgttacgttgcgcgcttacgtcaccaggtctcccgtcagaagctatcttactttactacagcgtttcatgcgatcgtccatcaacaacgggccaactcgtataagatggtcaagctaggcctaccatgagcacagtgaaagggatctctagtcaaggtcaactctcgcataagtgttcggcatcgagcgagaggtaacgaatcgttgaacatgatcgcgcctgtcgatcgaagacgccagacgagaagggggtaaatacgaccgcctatcgcaagattgaagtcgcggtccaggtcagatgactgactaacctcggcacgcattcgactttatcaaatggataaatctcgagggacaccacctcaagatgctgttcaagtccttctccgtctcgacgagatccgctaaaaacccgttgacaacagcatcgctagcaccggcattgactaattcgctgacgtagtcgtggaacgcgcgctcaagctccgaatgatcctcagccaagcggttcaccagtattttcggaacgctcgtgattgtggctagatttgcgatccgattttgcggttcgcacgacaattcgtatctcagtccccactttccaaacagtctgtgcgccaaggggacctctgcaaaaaacctttgttcggcgggggtaagtcgaatgggcaggcctggttgcactctgtgtatttccaagtcagcggcccgaaactgatccgacatgtgttcgagcatctcttcgagccggatccgctcgtgtactgcatgttggtcgacagccacgatgaagtgtcgcgaagctgctgcggtgttcagcccgccttgcatcgtcgccggatcctcccaggtgcaagcggacatgcgacaaatgaggaacttttgatccgcttgtccaagaacgcacgcgtcactcagggtgagatgcgagagattgatcgatggggtccggcagacagtgatcttgaccgatgatggtggcttggagattttgtgggcgatcgaatggaagactcgatcaccctgctagtacgcgccgtgtggtcaaggtaagctcgcatgagatggtatgccgagacccttacatacgattgagttgatagggcaggccaaatccgaaagaggtctttcgtctcgaccgtttgaatgatgcggattgagactaaacgcatgatgaacatcttgagggattttggggttttactaccatcggcgtcggactcacgctgcatttcggatcgcagtcttgttagcgttacccgcactgctggatgagttacatcgatgatccaaagatgactgctgttctgagtctctgggtctcaacattccataggaacgggcttccatcgaatggatcttcttcgcacgtaaaagctgaaattcggaatcgcggtcgcgctggccattcgacaccgttttgaatctttcctggctgaacaatttcataataacctcggagagtatattcgtgagcttgcttgtgtcctggatgagtcttgtcagatgatgttgtggtggtggtagctgacctggtggacattctcacccgatctagcacaacgcttttatccgcgggagtaggcatctgggtggtcttcgacttcacggtgacgttaatgacgaataatgaatgaacaggactgcggtcattctcgtcattgtgacctgtagatagttcaaatcgctaaaagcgtgaccgaagaatagatgaaaaatcccttaccggaacacgttcgttgttcaactcgttcttcctgcgttttgacagtttaagtcaatgaggggagacgaatcacggctgtatacttgctaacagccctgagctaaaggcccgatcgaccgtatcatgtagctctctctgtaaggatcggagcccgtttatatctggctccagataaaatgtcagctttcggcgctactgagttctcacaacggtcaccgacatagatactgttgagcctgtaggacaaattatgctattgtaagcatgaagcagtccggcaaatatctttgcctgaaatactcgccctggaccgattgttccaagttcctatgacgccttctatcttcacacagcttccggacggctctaacatagcactcgcacctattcgctagagataagccagatggtgacgcacgtttcaatttgtaagcaacgtcaagaggtccaaaaagacttgccaataatcgttcatgctccctgattccaagaagtgagcggtaagctacgacaggctcagatgcagcacggtgctggaacactggtaggtatgccgtttcgcctgtaaggcatgcaggatgcttgcttttacaattgactgaaaggcatatgccaattgtggggttgccaatagcgcagtgctggatgacggtttgaagcgattgttcttgtttgtgcgatgtctccatattccttctgatcggggtctgtcgaaaggagtataccatggaactctgactgtaagagagggagactcataaagtattcgtacgttaccgaagagtccagagatagccacggtggttccggcttgctggcgacacgtcgaggatgccccgcaactgactactcggccgtactgtgcagaccagaacatgtgtaggcaagtaagtcatgaagagaggctcttgacaaggcccaataagctgtacctgcaggtgcttctccaatgtcagagtttggtcggctgttcgcgtggtgatccgcacttcggcaatctcttggagggacgcgagagctgccagagccaagacaagaatcagcccacggtagtttagatgcaatcatcgcccaagaccgctatgaccttcgccacggcagccgtaggtgcttgctagtgccacatcagctgttgtattcaggactttactggtagctgtacgagcaatgacagcggcgcgaaatgatttatcagccaacaccccgctgtaatcgaaatcggaacatcgcaccatatctcgaaccgactttgtccagatccgttcgagcgatacctccaccgttatctgaaaccctgatctgccacaactctggatcggcccagcaatctatctgcgtagctccagcatccatggcgttgtacaccagctctctcaatgcatccgaaagtgatgtgatgttcaggccagatcgaaggcgagatacgatctgggcgggcagcggttgtaacgacatgcggggccgcaactctaggcattcaggttgtagtctataagatggagacggaatagagattgttcgggcacaccgcatgtagctacgttcagcaagtgaagaataatgctgtgggtgaaaacgacctgatggctgatggccacccttaccgagacgagcaacttggacgacaatggctgacaagcaccaggctgcacgacaatcattttgatgacaaagttctagatttgtagtcagattttcacaggatcgagtgggagccaggatctccaggacgatagaaggatggtcgacgccgatcacggaacaaatacctgtcggccgaagatcgttgagcgttcatattgtgttgttcccccggcacttaataataaatgatgatgatgatgaaacgcgccgtcgggctctcaaagcccagccccttcgttcttcccgcgggtttgatcgagcgacaccgcggaaggtctttcttcttggaactttcgttcatgtcactaggtcactagctcgccagctcgccagctgccagctgtaagtttctacgagagagggggaatgagggggcaaaggaacgacgcaaggaggggagagccgagatgggtgacgtcatggattttacccgaccgaaggtggggattcgtcatgtgcacgtttcgcgctagagccaaacctctgccaacacgctagctatcacacatcctgtcgtccttgcgagaccgagcgctccaccggctgcttccacctgccacctggactcacgcaaagcaaagagaaaactcctctgcaagtcgctagatatactctcccgacgacccattagccacaatatataccactcaaattgcccgcccagcaactgtttttatcaagaggaaatcactttgcacgctggtatctcaacacacaatcacggaacaagcaaaagtaacagcaaaggatcataaccatgtccgctcaagccgagaagaccgtcttcttcctaggaggtaccggatacgtcggttccgccgtcttatctcgattccttgcgctcgagacgaagcatcaatacaccgtcttgactcgatccgaagaaaaggccaagctcatcgaacagatccggcccggtcaggtcaaggccgtgcaaggcaatcaccaggacctagagttgatcgagaagctcgccagcgaaaacgacataacattcaactgtgctgattcagatgacgtgagctagctccgttgactggcatactgctaatcgctgctaacagatggcattgcggccgtatgcgatccgctcttttagcttgatctcacgaaagctatcttgaagggtatggcgaagcgcaaggcctccaccggtcaccggcccatcctgattcacacctccggaacgggtactttgatcgacgtacgtgacctctagagcgactatcccaaccaaagtgatcttgtcgctcatacggaccaatcgttatgtataaacaggacgcgcgaggtgcttatcctaccgagaccatctactcggatttgcgagccaatccctcagccaagcctcccctgctcttcctcgactcgctgcctgctaccgccttccacaggaatgtcgatctcgaaatcatcgaggctgacaagcaagccaacattcgagccttcatcatcctgcctagtaccatttacggtatcaacaggctcgaactcgctgagaagggagtgggcaacccgcagagccagcaggtacctaacctcatcagagccagtatcgataggggccgagccggtatggttggcaacggtcaaaacatctggtaactttgtctgtcagcgtgtcggttttcggcttcagctattaactcgcgacacgcctcgcaggcctaatgttcatgtcaacgacaacgccgtaagttgaacagtatcctgcattattttgaaaggaggctcatgactggagccgtgctacaggagctgtttgtcaaggtttacgagtattctgtttctggaaagaagggaaaccacggagcctctggatactacttcgctgagagtggcgaatacacccagtaagcccatgaaaggttctaaccatagctgatcaatagaatcgctgactcgctctgcggatgctcgtttctaggttcgctcttgctcagaccatcgggcgcgtgctggtcaacctcaagctgacccaggatgcagagccaacgacgttcacgcaggaagagctcgacaaatactacaacggcgtaagctgaccgtaaccttactataagtgggaggtaaatatcctaacgaacgtcttctccctcatcctcaaagtcatattacgctgggaccaacagccgttgtcgcgctgaccattcccgatccattggctggcgaccgaagaagaccgctcacgacttttttgctagtgtggaagaggaagtgcagcaggtactcgccaagaacaagaaagactagaacggcgatgatgcataaattgcccccaatttttaaaacatttgtatccatccaaaacagtcaccggaactgcccgaaataggtcatgtgtcccaccttgcatcgcaacatcatggatttgctagctcgtcatacgagagcgttgcaagatgagatatgatttggaggggacccatgttgcgcccggacatagcttgcgatcagctacctgttctccctctatcaattcatgttcagggcttctgttacggcggagcttcgctaagtcgcgtctaatgaatatctgagtgcaatgtcggtacggatcgtaggtagtcacaacaggagtgaagccgagtttggctaatgggagcgaattcggttgggatgatacgaatccgggttgatgtacggataaggaagtaatgtcgctataggtagctaggatcgaaagcttgttcagtacgaacggtgagacgtctactacttagcgagtgtcctgggttgtaacctcttcacaatacgtctcgaagatgcggtgctgtcgcaaatcagtaggcgtaaatagaatgcaatattggaacttgacctttctagtacaagaacgtcgtctgccggttctggtcaagttctactaagtatatatacaaaaacgagagtaatccttgcgagttgagaacagtaggcaacccaagagcgggtaaggtgaatccgggacaaagagccaaattgagggtcgagagtcaggcacctaacaaagaggagtcattatttgctgagtcagatgtctttgtttgatgtattcggttgttgagctatgaggtctttgttcgatatccgtcgatgtcgctattgttctccgctggcggtgaaatcgaatatgcattgtgtcgatagcagagagggtgacgagagcgcacgagccgaagccggcagcgtgggagccggatgcgcaccgcttcccgtaacatgtgcggtagccagaccgctggcatcaacaaaatgttcagctggtagatgcaagcaatagcaaacattccattctgaaacaggggtctcgtcaagtcagcctgcgcttatagggtcttggacctatctgaggacttcttcagagactgacaaataacatcccccctatgatgacccggtgttgtggtccaatctgatggcttaagatgatcagtagtattgctcttctggatggcagcaacgagaaatcgactagaacagaagccaagatcagtgccaagcaaaacacaatcacctcccttgcctagaacagaacaatcgagaagagtaaggtatcatgactgagcatgcaggttcagaggctacataatgaaagatggatgatcaaggtcaaagggaactgtcttatcagtacagctttggtcgtcgtgcaaacagacaaatggttcaagagggtgctttgagagaatgcctcaagagcgtgtctggtaggtctagacaagggatatttatcactatttacaagttcttatgttgcacaatggagatggccatggccgcagtgtgtttgtgtttgagagatccttgcaaagcggtttgaatgttgaagggcgagtttgaaagttaccgtcaagagtgaacataacggcacggtaacggcactgagcctatattgggaaacaccggagcatgatcggaccaagcgcgggctggagcagaacccacgggcctttgcacaacagcagtaccgtgcggattggcgcagaacaatgcagtagatcttagaagtatatataggacgcgtaaagcagctagagtatggacgcccttgtatctctagatgattcaagcgcaattatcacattcaacatacacctaccttgttgcttacttcaagagacgtatcaggagaggttacaaacaatgactgacgagaaagcaagcaagcgcacagtgctgcatgataccccgtcaagtataaatacacgttgccctatcacacgcgctggactccaactttttctcatgtgtcttcaccaccttattcatctggactctgacatgtcatcaagacctgtgtggccagtttagcttcattacgtactgtaccggagacctgcttgctgattgcccgtaacattgggctactggtaggtctagtgcattccaggtgcatttgttagacagctctatctagcacatttcatacacattagcaattcaattgattatgctatctttggtcaagtactattcattagcttgatatttccgtctggctgtctatgctgtactgagccggtgcccatgggtagcatattcagtgctaggcatatgagaaaccttcttgtattgaattgatgtctcattcatcatcatcctatgtagcattcagtgcacgtcattgttcacaagtgacccccatgatcgatcagactgctatttgcatgttgggccttttgatccaatatttcttgctgcattctgttctttgctgtggaggaccaaaaccttccatgagttagatctttctgcagctatcattgtccagaatcttatagtagtcctaataacttctttgagatcttccagatccttcacatatctagacctctgaggctgttaagatactgcattatccgggatctgatgggagggactgttgaaatcagatcttttgtggaagttgcatccacagcataaatagtcataagtgaacaagtataatcgatagcaaataatcatgttccggaatgcaaatatcaggattgccactagcttagttgatcgtttgtatacctgccagaaaaagagtgtcttgctctacatatgccctgaatggattgcagacttccgtatgacgcatcacaagcggctgtacgagtaagggcatcgcttctatagggagattccactggaactagttgcgtgagacatgagagttgtaatcttggtcctgagcaacagttgatgcatgcctaaggctttttgggtcaatcagtcacatagaatcctagaaagtgatatcttgtgtacaacgaccaacggagcaagcctttactacattctacagttgttatacaatgctaagcaggagatataaggtcaaagtcctgtgtagattgcaaagcattcagcaaggcatcacactgcatgctggatcaatccccattcagatatttgaatagagtttgcaagacatgatgttcattgctgagggctgacagtatgttttaggtatcttcacgatcaggcaatgtgggcagacagtgcccgttcaggtggtgaccaggatttgccacctgctcattcacctttcccaagctcaagagcagttgcatcccgaggatcaagcaaacccaccaggcaacaatggcctagtatagtatcaactggtaaacatgtacctgaataatccttgaaagtagctagctagatactggactgcaggaaatcctctatcgcttgggtcagggggcactatctgcaccattgcaatagaatatcaggggacaatgtcacacaaagagcttccaagggagaagtccctggaaagatctttgaactatcacatagattgcgtgagagggatatcccctacgcatagattgtatgacaagctagtagtgcatttttcatgcaaccctactaggaatcctcagatgcaagtcctgcatggcgtacaggaatttggaagaactgagcctaactacatatatatgtactctgttaccatccagactgttgcaaataggcatgccatgattgctcatggatgcaggaagcaatctcaaccacaaagcctcattctgtagaatgtacattgtacattttacttcatacaatctacaggattcactgcaaaatgtacagatttcaaggggttgtgcagccacaaaggctaccatcagaatagtatagtatatatgggaggccaatttggtctcattcctttttccctctcatgtactactttacttctatgcaagcaacattgatcatcctttcacaacaaggcatcatcagcaccaaccatagtgcctggacccagcaagtaaccaatctttgtggatctagttgttacttcataacaggttatgagcccagtaattgtggcctaatctacatcagagtaagcaaaaccacaatcaacatcctcaactatcaggatcatcaagagatatcactggacatagttggacaggattgatactgttggacatcatggataccaacaattcaagctcttcagtcaccagtaggatacccatcctgactggattggacaactactttcaatggagaaatgcaattgaagatggagcacttgtctatggagcactgcacgtgcttacagaggatctgaaggaaagacctgtcagacctacagagattgaggagaaggatggctcaaaggtagctcctgcctcagctatagtctctctatacctagaagactatagggaatggaagacctggaaggagaaggatcagaaggtcatgggccttatgagactcaatgtctcctcaggcatcaggatggaactagcaggatgcagtacctccaaacagatctgggacaagctatctaagcttcatcagatggacgacaggaaccacaatgcagacatagaagaaaggatcactacactcaggatgaacgaaggagatgatccagtcaaattcctagagctgttcagcacactactgctgaaagctcagacagccaactttaagctgtctgaagaggataaagctacctatttccttgaggctttacctgtgacttatgagtccctcaagtcagagtgaaagtcactgcaaaggatcaaggagatcacccagcaaccaacttccacatttgaggatctcagaggaatgttcaaaacttacatcgctgacatcaagcgtcaggatgaagtaaggttgcagaatgcaatgatggtcaagagaaccagtcatgtgtaaaggaaaggatttggtcaacaaaggaataacaaggaccagtccttcaacaagaacaacctgtcttgttggaactgtggaaaacaagggcactccagcaaagagtgcagatcctctaagataggagatggatatacccacaaacccaaaggacaacagaatagatctgggttcaacaagcctacagacgatctggcagcaggcctgcacaggaatatggcaggtgcagccattcaagagatctctgaagaagaatatgctgctctggtcaaggaagagagcatagaatggcttgttgatctgggagctagctcgcacatctgcaacagcaaggatgtgttcatccagctggagaggctgagtttccccaagagattcaggacagcctctggtggtgctacagtctctgaatatggaggcaagattaccatgaagttaccccaaagtcaacactgtttgactctacacaatgtggtgcttatggaagatgcaccagccaacctactcagtcaacaaactctaatcaaaaagggatgggatgtgcagatcatcaaacatggtggcatgatcatgcaaggtggcatcaacatcccagtctacaagacaggtgcagaaggaaccttgagggcattcaagttgccactcagtaaggactactatagtcaagctgaacagcaagaagatgctgtatcagagtgtatggaggagaacaaggcagaggatgcctacctcaccgtccaagacaaggacaccatacaaggatggcacaacagactaggacacatgggtgtcagtaccatcaagaagcttgcagcatcaggacagttgcatatcaccgacaaggatacatctaccttcagaatggaagagtgtgaagtctgtgctattgcagagacaaccaggcttacctttggtgacatctcagtggcagctcaagagccattagagattgtgcattcagatatagctggacccctcaagccagacatcaatgggcacatctactatgtgacctttgttgatgacttgacagggctgacctgtagtggaggtctcaaaacaaagacagcaatggatgtccttggatgccaagaactccaagaggttgtcagaattggctttcaacaagaaagtgcaatgtctgagaacatatggtggaggagagtatctaggaggcatgaagccatatttgcagctacaaggcatagttcaccaggtcactacaccacacacacctcagctcaatggtacagcagagagggcaaacagaacactcaaggagatgtgctctagcatgcttgttgctgccaagatggatcacaagtggtggttccatgccatgaactatgcttgcaccttcatcaatatgggcaagcaatatcaagggagatatctcaatgagatcatgtggaagcacaagccaggctatggccaacttcactcctttggcacagagtgttgggttagagtgcccaaggagggtagactcaagaacaatctcactaccaacaaagcaatcaagggaaagttgctgcatccaaacaccactggagcaggcttggttgtcacacaacaagaaggaagagatgtcaccctcacaagcagggatgtagtgttcaagaggccagagggagctagtgatctggtcactaccaccctactgggaacacagcaagaaggacatcttcctgacaagcagtacacaggtaacaaaggacctgtgagtgaggaacttccacaggatgaagaggatcatcaggatcaacaggcgcagagggagagacaaacaacttctccacctgcagttcaagataatccacctgcaatggatcacagagaaccttcccctcagatagaagaatcagaggaagaagaagactctgatggtgaggatcccatgttgctcaaacccagggcagacatcaggagaagatcacccagactgaacatcatagaggaaatggcactggcaagtgtgcatgctgcagattttcaggaggaccctcagtcatacagggcagccatgcaagatccaagatctgacttgtggcaagaagccatcaacaaggaactcaagtcagtcaaggataccggaacttggcaagaagtcaaggttccagaggcagctagcctggtagactccaagtgggtcttcaagacaaagctcaatgagagaggagaggtggtcaaatacaaagcaaggattgttgccagaagcttcactcaggagtatggcatcaactactttgacacttacagccctgcagcaaggcttacctcactcaggatactgctcgccattgtggcagctcaggacttggagctttaccagatggatgcagacactgctttccttaatggcacaccagaagaagacatctacatggactttccagatggataccaaagacaggacaagaggtcaacaggactcaaacttgtcagatcactttatggtctcaagcaatcacccagggtatggtggcaactcatcagctcatacctggaagagttgggtttcaccaggctatcagcagactgggggctctactatcacaagaagaaacgggcatatctactactctatgtggatgatgtcctgattactgctcaagacatgagcaccagcaatggcatcaaggatgcattaggagaaatggaaatggtcagatataggcacagctacctatattcttggactcaagctggaaagacacaggtccagcaggaccatttcactcagccaagaaggctatatccagagagtgctagacagggttggcatgcaagatgtgaagactgcaaccacacctctctatgatgctatcatgagaagacaggacaataccatcaaggaagacaagaacaggaaaacattttatcagcagatagtgggatccttgatgtggagtgccaagtcagcaagaccggacatagtctttgctgttggctatctcagcaggttcagcagcaacccatctgaacaacaccccaagacagccaagaggactttggtgtacttgaaaggtaccattgacaaggttcttacccttggtcaactggacaacaacacagaaggcattcaacatagcctcataggatactgtgatgcagactatgcaggagacatggagacaaggaggagcattacaggatactgcttcaagctgttggggtcagcagtctcatggacctctatcaggcaaagcacagtagccacatctacctgtgaagcagagtatatggctttagcagaagcagccaaggaagtcatatggctcaataggatgctacaggagttaggcttcatcaacaaggacaagccagctcagctttactgtgacaaccgaggagctctggcattggcaagcaatccagctcaccataagaggtcaaagcacattgttatcagatatcactacatcagagagatggtggacaatggacatatcaccattcaccatgttggaaccaatgatcaggcagcagacatgcttaccaagccattgaaggatatcacacacaagcacaactgtcaactgatccatctagagtgatggagtgggcaaggatcacaagacattctggaagttgaagagttactccatccttctcaggatgcggctcacttcagaatgagaacaacaatttaggaatggttcaacaagaaaagacaataaacatacaaagtctcaggtcaaagaaggagggctttgagcttgagcttgagagggagtgttgaagattggcatgctatgacatcataggtgatgctcagggtgcaatctcaagcacaaagggtcaacatgtgactaggatcacatgttgtgactggagtcacgcttacacaactggaattgcacactagtgactgatttgcgactgatttgcaactggagtcacgcttatgcaactggagtcgcacattagtgactcatatgcgtctgagttgcacttatgcgtctgagttgcagattcgcaacaagcctagtcgcaagtacactgggaggacactaggaggacaccttccagaaaagtatatataggagaccatttgggtctcatttcctttcctcctctcatgtactactttacttttatgcaagcaacattgattccccttcacaacaaggcacgatcagcactagcaatagaccattgctattgcctagacccagcaagtaaccaatctttgtggatctagttgttacttcacaacaagcttgccgctccgatgtgtctgcaggaattcggtctggcattgttgtggaaaagtcctcccttggtatatatcttctcttcccattgcccaatctgctggattgcttgttcttacttgctttgcactgcagatttatctggctcaagacaccaatatgttgtgtattatctccttgaggttctgtgtgttccctttgactcatgaaccacatcaagaagtctactgttgacaagctggtacataggtcatatcaatacactatatcttcgaagctgctctgcaatccgtactgacatgtgtgcatttgtggattgcgatccaattcaatccagttccgcattcgaggttcatgacctttgtgtgacaccgtgtcactttgcgagaacggtaggggccagcttcacaggttgactgtctcgaaagtcttcaaagttgacttattctttccacctcttatttctagttggaaacattctttggccaaagcttgaaaagacacgctcatggtgaggcatgggactcagccccgtgactgtgaaaagatctcttggtgtccatcgtctgtcccttgcaattcctctcaggatactttttatctatgagagggtatcaccagtttgtaaactatactgaacgatcagccacactgtgcaacaccaacatgttgtgatattggctgctgccaacggtgtgtagctactccttggtagtggttgtagtcactatgtcttgagtcctattgagtactcaagcgtctggtaacaggtagaatacattacggaaggctaaatactcgcgccaaagcatatggaaacggactctaaccccctaatcctgcacttctacccgtttgcttcttactcatctactttcttctctcttgtctgcctcagagtccttttcctcagggcgcgtatggacttgtacttttctgtaccgtaaagtccgattcccaaagcgacgcgtacgtaacagctatcgggcttcttgacaatatcggccaaaggcgagactcgcgtcaggcccgacgttagtcgtcctgtgacagtatgctaagattcgaatgtaataacaagcttgacttctaaaggagacaacacaattgtccaggacgaatctattctactccgctataagtactgcgctcgtctcccgctctacgctctcgaacgtttcgtctctcgcaaatcgtcttccgtgactcaaatagtcccgtggaaaagtgagatgtgtagtgctgcgacgttcaattcctaggcccccaaatgattctctaggtttcgttttgcaacccgttccatcactgaatcaggttcgtagtttgtccctgcgtctaatgtcaaattgttctttgggttgaaagatggggaacgcggtgattgatccttggtgtccttctatgcccaacgtatcgtctatgtcgttcgatctctgcctaatttgtgattcgtcttctgtctctcatttcccgtctcccgtctttgtcttaggtcgtttcgtcaagcagagacgtttgttcctatttgtcttttggtaaacatcttgaaccttactgcttggtacctttcacgtccaagaggtgcgggagaccgactgataacgctataagcgatgtgacgtatcttttgcttgtttccaaaagcgcgcgcgtgtacatttgtcgaattacgtaacacgatttgtcatacgatctacgtgatccgcggtacgtcctctgctgatgacgcgtcgcttgacgcgtggcctttgttgttgttgttttctcgtgttgttgaatcgttctgcaacatgatactcgattcatgtttgtgtttcgtctttcgttgatacgaaagagatagtcaggttcgtgacacttattgtgaaaggataatcaatgttgcttgtattaaaaagtaaagtagtacatggtagagggaatggaactgaggtccagatagtctcctatatatacttactattctgatgagcatgtcctcctagtgactctgctggtgttgattgttgtcctcacgcggcgtattccgaactaacaaaatcgtccattggcaagcgtagcattagtgatcagtgatttcgggccgaccggagtgattggagtaaggcgtgttcgcggacattcatgtatgcgttgctagtatccgctcgattggatggctacgccccaacgaatggcttgcattcctcaactggccgccttcatgttattacttggagagaacaaacaaacaagttcgtagtgcaggtgtcgcactatacgcagaggtttacattcacataaggctgcacgatggccggttagtatccggaacgataaatacatcaggttcgtatcttcctcgcgatgtcatacttcgcctttgccagatgtctgaccgagggtgtgtcacattttggaggctacaatgaggcactagtcagaacttacttgaagaagatcatggtgagcgggacctatgtcgcaggaggactacgtcggtcgatgtggtccgacaatcatgcttttggccaagatggaaggcgcgcccttgccatcgacctatcgtagatccccggagagaaatggctgtccttcatactgtcttcgctgatgtatcagggtctcctctagcggggcggatttcatcaggagggtggcaaggtcgattgagaggcacgccaaggcctgccttcagttgctttctcaggatgtcgatctgtacgatgtgtatcagtgcgtctaggttctggctccaccgggggtttctccggcggtctaagccttccagatatcaacaacttagatgcactcccaattgatctttttgacttccgaattctcgatgcggaataccttctcttctgacttttaccgctccacaagtgaaatcgtctcccgcttgaattctcacaggaacttctcgttatatctccccttgtcgctctctgtaggtgattgcgtgcttgacgcagatcagccactagaattttcaatctagatggttgctcgacatggcagttgtcaaccttcaagcgggacacgtgctgaattcctaacaatcgaatcctatgtagccttccttcttccatatcgggtcttttaatgtcgactgcagttgatcgattgagtatcgagttgagacacctaagggtgattgaagatgatgatgtcatgtcgacttggcatacagaacacgatttacagattaacaacgagatgactgcatacatgtcggtatcacttgtgattccatacgtcaggtgttcctgccgtgcccggttaaggacacaaacagagacgtccgaaagaaccaaagaaggatatcggtgactcggtctccagttacgagaccccgagaaaatgattggccggcacgaaagtatcgacgtagagcgagcgagtccggctgacttgtgagtatggggtccctacactgttggtttaaattagatgaagaagaaaagagaccgaggggtgggcgagatgatagacgactgctaggaaagaaaggccaacttgtacatacgtgcagaggatgaaaaggctgccttatcaattaaattcgatcagatttgggagtcaatcagccacgtgatgaacaatgtcatgacgtgtaaataataataatctagctgaccagacccttcccggtcgagcttcgtcatcatactcacctactacacctcctcgactacactagtttccagatgagatctgagagtaacacgactacaagaacggcaggatcctcatgtacaacacaactagtagcttcgaatagccgttcaaacgaccacatacatacgcaacccgatttctttttgccagatctcgagtcttgctacaaaatggccgaggagattccgctcgacatcgatggctacgcatcggagtacaccggtgagtcactgcgggagctcgattggtggcctcgactgcgtcaggcagcaaataatcctgacataaaatcaccaggccgaaccgcaatcactagactcctggtcattgccaaacatgctcagcatcgaggcgcgcgcttgcgagctcttttgctagcgattcaacgagtcaagacggccactctcgactttgagctctatggcaatctcatggaggacttgaacagctatcgccaagggcacggtggactagctgaagactcagggtcatttcctcaggttctcgacggtatcaatgtgatggaggggttgtccgacctcgaggtggaatcgagcggcaggatcgacgaggaatggctgtcctcgactacacagcaagtcaagaagctggatgataagttggaagccgagatgcgaaactactccgtcaacctgatcaaggagagcatccgggtgagctaacgcaatagagtgtctctagagtcagcaaaccaaagtgcccatactgactctgtccgaacatcccagctcactcaccacgctcaagcgactcacgcgagatcgcatggtgacatggaggcggctctgaaatcttattcacagactagagatttcaattcgagcgcgcaacacgagctggatagcagttttggcacgatcgaggttcgtcacattcaccttggagtcgcatttccaacgtccagcaatcgtggctaacgtctatacatacgatcgtcttttcgaaggtgtcgctcgacgttggggcattcacgcacacactcccagccgttgctcgggccgagtatgcaatgaatcggctcgtttcaaatttcacgtcgatggctgctggcggtgttcaagtctctgctacgggcgagtattctagtaaccctgcggtaatcatgacaggcgcccaggctcgggagaaacagcggcgagcgacagagatggacgaactcagtttcaggaacgataccaagctgcgagtggctcgaggtatcgtgaagatgtgtcagggaacgtctcaatgggcaagtgcagctcgagagttcggtgggattacgggcaaattggaagattgggaaggaacagtgagtcgtatggccaacgccacgtttatcacgcctggcttgaatggtttttcatcctctcggctcaggtgatagcttcgggcgatgtggcgatctacgccacattgacgagtttggcaacgtcaggccgttcaaccatcaaggcattgctagtcgataatgctcaaatgagatatttcatggattacggaagcgctgcctataccagagaattggtcgactgctacatgcatgcccgatatcaacgactactggaaattcttcgggatcgcagagtaagaagcccgattaccactccttgctccatgtctttaggacctctgatcacattcttcgtggcagtctcgacacctggtagaccctttcctacgacccgtcattgctgcgctggaggaaagcatactgcaaaacgctctcgttcaatactttcaaccgtacaacagtgccagttttgcacggatgcttcaggcatttggtgataacaaggaagctggtcaaagagatcttgcaaacagactcgccgtcctcatcagggcaggccgtcttcaggctcggctggatctcgtcgagatggtcagtctgatcgcgtagatggagccgagtgcacccagattgacgactgtcatatgctcaccccaggcgatgcatggttccaagcctgacgcccgtcgatctttgtacgcggaggcgattgccaccggctcgaaggtgcaatcggccagccgcaaagcgatgctcaacatgcagctgtgagccgtacctaatgacgagcactatccccgcggaatctgactggcgttctcaatcctagagttgagacgggcatgaccctggatggggtcaagagtcagcccaagaagaagacggccaagaaacgaggcggcgcatgatgacgcgaagacaaccgagaccagattgcaatgataacgagcctttacgaagcgaagctatgtcgtgttgacagtcacaacgcacatgacaagtctgcaataataatgtcccatggtctttatgtacaacaaaacgcgacggcgctgccgaccgacaatgcaatatgatgcgatacaaccgggtgctccacggagacttctcgaactctatgctcgttctcacgccttcgcccgcatctactcgaatcgcttccaagcgtgtttttcgtattctttcgtacgaccgatatgcctctttggcctgcaaggatgaacgagattggcatcagtctcagatctagtcgcaacgcggtcgttgcgagcggcgcttacagttgtctgactcgcggttccaagagtgttcggctctgcaacgctcggaatcggtcccggaagaggttgccctccggctgcaacgacaccttgcgcttcagcaatttttcttttgttttggtgatcacggaaggcgtggcatcgcatgctcaccttgacttcgcgcatgttctcgctcaggtcttctccgagctggacgtcgacgttgcttgacaagaccttgtgctttccgatcttttctcctccttgatagcctactagttgcttggcttccaacgccgctcgacgcgcctcgaggacctgtttgcgggatgacaaggtattctcgacctttttctgcaggttggccagcgtcgccattgctttcttctgggcctggactgtagcggcttgtttggcgatgcgtcgctgtgcaaaggaagtgggtaagtcgagtgtcgggcaaggtcagccagtcgcatggggtacaggacgaatccgccgatcccgactgacctcttcaatgcgacgcttggccttgttgcgatctgcctgggtttttctcttgatcgtcttgctaagctcgggcacatcgacctcgacgtcttcgatttccgcgctctcgtcctcggccacggcatcggggtctcccgaggcgacgagcatgccgcccgagagttcggtgccgttcttcctcgctgcctctcgcctgttctcgagtacctttttgtacctctcaatcttgtcctgtacttcttgctcctttctcaaagtctcgagctcctgcttgacagcctggtcgatgagggcttgatgggcgtcgagtccaggattgtaagagattccggcatcagggatgggcaccgacttggtttgagcggtcgcattctgaacccgacgttgttgctgcagggtcgtagggacgttgggcaagggctgttccttgaagttttctacccacttgcccttggctgcggccaagcgttgagcttcgagttctctctctgtccagacgtcccgcagatcttcttgcgtttgtttggccacgatggcggaacccatccccgacccgtccgttccgacctgaccttttctggctatccgaaggaggcgctctttgtcggcagcggtgaccttgggcttgtagggcttgttcgcggcgtgaacaggctttgatgtgagggctggaactgcagagcgtttttggaggatctctagcgacctgagcgttcgaggtttcttgattcgcttggcaactgttaagtcggagcgggagaggcgaggctaggtcgtggtcagcatggaggtcgggactgtggagtattgctgtcgtcgctcgacttgcccatttcatcaccggtcgtatcgatggtgaacatttggtcagaggtcgatccgctagccttgcctctatcgaaagacggccgattgagtcagggcaaaaacctacgtattcgtagcttattaagagatttagactcacccggtcaacctctcctctgctctagcgtcttccatggccgtctcctcgggttgaatgtcgatattcttcctccatgctttcttaccctttcgcgtggcttgcttgaattgagctggtgcgccaatctcggacgacttgagtttggatttcaaggtcggtgccatgatgaagcggactgtcgacgtttggtggtcgtgtgtatgtgtgtgtgtgtatgaatcgagacgagaccaagtgaatgtataaactaaggtgtcacctaatagttacctgtccaggagattgaaatggtcgatcgaattcacgaaattaagagaatcacgtgatgatgaggtggaaacaaggtggacagagtcaaggtggaaatatcatcagctcataaacgtagaggtgaagggtggaaatacacgctcgctaagaagcgaattaaagtggacgccacacacagtgaaaagtggacgcgcgcgcttatttggcacttttcgggcttcacgtttcacgtttcatctattcatgtcctgcgtcagtctagcctggacatgttgaccgacctcgctcatcacgctagactaccatgcttgactatcattgtacttcttgctgcagcagtcacgtaatcccccatgaacaagcccccatgagtcgagcagaaaaaggatcaaaccgctcccatcctgaatctaggatatgcaaagattcaggtttgatgcaacgagaccacgacccggcatacctgggccgagataccgtttgcggcgccacccacaggcgagaacagagttcgatttcgacaatatccttaacacgctgagatgactttgtcgatactagtcaccacattcgacgtgcagggtcattgcgagggaacatatctccaaggtcaatgtcgtcgggcgttgggggatgcatatataaaagactgtaacgttaggtagtttcgacgcgtccgttctcgctatggccgcccgacctcagcgaaaccggtctcagcgatgataggctgggtctggcgtatccggcaagatcccgttctcaaagtcgtcggcgaaagagctaggtcggatcaaggtctggccgtacgaggcgtgaggagaagttgtacggaagtctggccatttgtggtacccatcatccagttctcgatcgcgctcggccatcggcacttcttgaaaaacggtatcttgctgaactggtgggatcgtgaccccctcgtcgactttcacgggatgaagtgatcgccaaagtcgcgtctaaaccgcgggtcaacgtatcagatctcgtttgactggcttcgtaaatcgatcgcacacacatactagaacggcgaccgggacgacgagacgaaacgcttcctctaattctcgcgcattcgcgtgcatcagttggttcatcgtccaataggccccgatgagacatgccgcatggctgttgatccgatgacggctgacaagttcgctaacgatctattcagaaagagctgcggtggatcaatatctacacgccaagccacccactactttgcttgtcggtactcgccatttcgttgtcccaccgaaggtaatctcgatcgcaaaagattgctcgggcaaactcggggtcgctctgctcggtatactccttttcgtctctctcggcacagactctcacgatcaagcccgacattttagcgtcatcgctgattacgtattcgtactccgtattcatcgcggccgctatctcgcacgtcgagaccatggatccctttcgtcggctgaccttttgctgaagtttctggtaggcaccggacgttgccgtagaccacgggtaggggaaaatgccgatactgtccgatctttccttgcgtggatgcaagatcatgacgatgactacgcgctgatatcgttcgcataggccgcccaaataggctgccagacgatcgcaatcgcttgccaacgcggccacgtgctgaaacactatggccgtctttggactgacgacgagatccgcttcaaggtccaccctatcgaccaggtcgatcccggctttgcttaatccgtggcataagatacgttcgaacatgacatccaccgcagcgaggcaagtcagtggttctagccggatgccacgagaatccaggtccgttagcgcagaccgccattggtcgctgttagatggcgcggagtagcgagcttcgtctcgaggggggatctgggtaacctctaatcgttgctcaagtagaaccggctccatggctgtcgaccgattgatcatgaacatgctgtccggcaatcgcatcgggtcaagatcatgtcgtccatcaagctcgagtgccatgtctaggatgctgtcttcaagccctgtttcatggtgattgagtgaggtaggatccaatcgcctcttcttgacacttggagaatgtagctgcttcacagagggctcggtgtgagagacatgtattgcattaatcgattgtgcggaatgagcctcgcgccggagaacagggacccggtggtctgtgaaacgatgagccagttggatacgtcctaaatctcgaagcgccagtagatccgatcggatgttcacatgtcctgccgtttgcaattcgctgagtgaagtaagatggcttttatcttctagagccgacgaggtgatctcaaaagggctatgtagaacacgatggccattagacatcctctgtattgagcttgccacgcgaacttgcctccaactcaactgaaacgaaggaagattgtctctcagccaagttgcctcccgttgggtcgctcttaggattgatacgtacgtccatagccaaatctcttcctatagcgctcctggtcacctgcttgccgatcctttcgcaccttttcaatcacagagatgatcagttgtccagacatacttgattatcagtgataagctcactcttcgtttacccacggccgaacgcggtgcgggcggatgtcagcaaacgatgtctccactttaggcactttggttctggcgaaagtcagcgcgatcactcgtatctcgcaacaactcagcgcgagactcaccgggaagccggatgaatacttcttgcttgtcaattgtaagcgcttcttcctctacacaagctttgctggggtctgaacgcgagaggatcgccgataccttccgttcgaggtcgccaacgggtggttgagaagcgtgagttgcgagactgttgacgtcggcttctgggctacctttgccaatcacctccgctgtccaggtggggcttacgtccacgctgaattctgagggaaccgtcaaaggcgagggagatggtaggcatagcagcgaactcctgtcgggcgtcacacaccgcttcatgatgggcagatctgttcgagcgtttcactgggcttcacataacgactgcgcggcatcattctggaaggcttacccaagtagccatcttcggcctgcagcatcggttctgtgggaccacgtgtttctacctgaagagactctgaaatctcactaggtgcgtcggagtacaggtgttcggtgtagccgaaatcgctagaggcgcaaatattgttttgagcgacttctacacgttcctctttgaagagtcgagcaggttttcgaggggtcagaaggctgtctagaaatccgacttgatcgatcagcctaggtttcatcaatagtcactccgaattgatcattacctaaaggggcaatcatctcttcctcttgaagcttgaaagccagatcttctgcctttgtatcggccgggttgtaaagctgctcgaccatcttgtctagattttcgatgcagcgctcatccgctcgtttctttttacgatgcaaaggctgatcaacgatcggtatcgatacaggctgcaatcatacctccgtccatttagcactcgtcgtctttcgcgttgtcggatgactttgaaaagtgcttgccatgatcccatgaagaatacacctgcccggcatcattgccgctgtttcgatgacagatccgcttcggcatttcatagccttcatcgtctccacgacatatcgctgatatagttgagcctgtgcccgcttcaattgaagcttgtcaggtctacgcgatacggcccgtataggattgtcagtggtttgcagcgataacataccgcgcgctggacagactcacgccagggatttcaggtcgatgcgagccgccactggttcatccaccgtcatcggatcaggcaagggtacgtgatacgagagttctcgggaactcaaggtcggattgatcatacggaaaggcgtctgtgagattgctcttcttgataggataggcccgctgatgttttcgctaaggatttgcgcgtctatatgacccgtatcacttgtggaggatgagattggaactgatgggcataatggaactcgatcggcgacacacctttgtaagcgcacaatgaaattcgtttttgatttcgaggtgttgtcctggttaaatccttgagcgaggtaatttcgacggcagattttcgtatcgattcaaccgtctcccgtcgcagcgtcagccgacttcggtattctgctgatcgtactgctaatgcggcgaagtcgacagcagcgtcaccgacgttcgagacggtagcgacctgacagcttgatatgatcgcagagtgaacctgctgcaacagcttatcatagggatcgatttggatccataagtcgatgtcgggatatgcgttcaggttgatggactctgtcgcgaggagaacctgaagaaagagaatcgggaagcgagggaatcggggcgacttgaacacctagagtattcacctcgagagcgaattgctcggtcaattcaatgtgatcgatgtcggacgtgcaatgctcgatgatgtatggtagaatcctgtcgcgccatggcttgaaagccgccttcgactcttgtacgagcattctattcgtgtcttcttgctgccaccgagtcgtccaggtagcgaacgccgcgattgatatgaactaggttgaatccagctgatagagggtgagttgtctctgaatgaagcttgccttagttatctgtctcttacctgaaccagatatcgacgagatatgatatgatatcgcgtccaaaaagcagactgactatcatgaaacgttgttgttgttgcacctcgttgcgaaaatggcgccgccgctcttgatcgagggaaagtagatcgatttcaacgactacgactacgactaggacgacgacatggtcgatcagaaccggttggagacgctttgtttctctctctcttagtattgcagttggtacagagtagaaagagtatagttgttgtccataaccatctcgcatcacatcccatcccatctttccctctttttagctacttttcgcgatttccgaggtgcgcaacatatccaacgcgaacaagaagcagagcatatataagtagcaagtctagtcgaatcttgatcaagacaacaccacgatagcactactactacttctctgtattgttggtatcacttccagcaccgtgctagtcctactcgtacgctgtacgcatacaccatgagttcatcctacgatgtgagtgagagaatgactgtggatcaagacgtgtgacctcattcgatcgatcgaccgatcgatgttcgctcactcaattgcttctccgtctctctatctctctcatctctcctgcaaatcctgaccaccaacgtacgctactcgtccggcgatatgtctggcttatttattcaccttgtgacagacgccattcctgtgcagaacgtcagtcgcccgcaactcaatcaactaactagcaagcagcactgatgcgagagctcccctatcttgtctccgtactacagtttcatttcgacctctcctctcgacattcatcccgggttctcactcgacagcttatctgccaagaacgaacacgccgtatacgtttcgtgagtcgatatagctcaggtcatcacaactcatatcatggccaaaagctcatcggacatgtcgatatataccaactgttgcgtatcgattcccgatactcccccgcgacttttagcccagagaccacagtgctcaacgtcctacaactcgtctggagcacacttcccgtcaacctgaagtcaagtcgtgctcgttaccacgtcaaaagcttgttcgcgctcgaagatcgggaacgaccagggtcactcgcctggagatcgaaaaacttggcagactttactcatcaggatgtggttaaagacaatggcgatgaccaacactcgtaaagcaggcaaagacaaagatcctgaagagacaatagtgttgatccaggtaaactcgtctggctcgtttcgcagatccaaaacgaaaaccctaggcgacgccaggtttcggtcaaacgattcgctctacatctcggttcatctgccaccaaccacgggcggtcctcttgcaaacgctcctggtgctctcttttcagttcgcggatcggccggtaaaccagaagccaagggcagcaacagccggttcccatcgaatgacggtcccggtctcggcgcaggggcaccccaaggtgaaggatcttggatcgaagcacgcaaggaacatcccccacccccaccagccaacagtcatcacacgaatgcacgcggagatcgacggaatggaggaggtaacgccggaggacgaggacgctcagcaccgggcggtaacgaccggtattttgagtcaaggcagcgaagcaggtccccgcaaccgagacggggaggagccggcggtgctcgccggccgtcgccttcgtactagtgcaaacggaatcgcaaagcacaagatcatgcgaacgatgtagcgaacgagattgcagtgtttggttgcccttgtcatacgctatccatattcttcagtcctcaaattacgaatgtcataccctacacggttctggtctctacgatgcactctcaggcatcgcccgctcctccttcctcggccacaacggcccgcttcttctttttcttcttcttggcgaccacctgaacgacttcgaccggtggagccgctatccgttcgtctaatctcgctggcgagtccggttcatagtcatcgtaacccgctctcacgcttggacccgaacgatcgacttgctccatcgccacgtcgatctcgagcgctctcaacccgccattggtctttttccgtctggtggatggtccagacctgtcattgggcgtactctgcccacttccttccggcatttcaccttgacggtcaatatgcacttccggtcgctcaggtggatcgtcctttagtggtgtacccgttcgactaggttgttcgctaccagtcgccgagagcaatttgcgacctggatgggcgtcctgcatggttccctcctcgtcatcgatctcgagcttgactattgggatatcgtccacgtcgtctaaatcatcctcgaccgcaaaataatgtggattccctgcctgcctcgcctttctagccgcccgtcgctgcgcacccgagacgaagagacccatgagccggtatcattctggcgcctgagtgtagtggactcactgctgctctctcctctttgctctcggaggtgccatccgccttgcgtcgcggacctttgccgttcttctttggcttggcagatctttccgatcctttgatagccgcctgcagtgctgccatattctcactggaatctagaccgggttcatctcgttcctcgtcgctttctgcgtcgaacccgttcgtatccatcttgagaagagcaggatcgacgagtggtgtatcgagatcaaggccttcagggaggctaacacgttcttgcgccttgtaaccgacaggattaagttcgtaagagtcaaataggggcgacaggagaaatagggactttggatatttgggcgtcgatcccgtctcgtcttcggcgaatccttctggcataccctctggtatattgtgaccgtcggtagggatagcattcttttccacatcattccgtatgagggtgaacaggtgagacaaatttgacgcctagaaaccattggatgatgagcctcgctcagaaagcatgcccttcgacaaccggcttacccgttcgtgcacgacaagttcggataggttgggaccgtcctttaacgtcgagaagatctcctctatcaagtccagacattgctgtcgaactttgacgttccagtcggccgagatctcggcggcccagcgcccaaacatcttggcgaccgccatcaggcgtaccgctgtagtggatgcactttcgttcttcgatcttggcaaaaggtcgcggatcaaacgaggagcatcgtggacactgcgatcagaatcgatgtcagctctctcgacatgctttacgatcaagccgttgcaagagtatctgctcacctgccgtactctccgcagatccaggcggcggcatagacgatctcggaacagttctcgtcgccctctgatgttcccgttgaaaagtgatcgtcgatcaagacccgttggcaaagctgcaccgcgtagccacgtagactcttgactctgctgacgacatccagcatcgaagcgcgtagttgcagaccgataggtgctttggcgacataggcgaggtcgatcagaaccgacatgtaccactcgaaatcggtcacattgtcgtaagtatctgccgaagtcatatccatgatgcgttgtgaaagctctagcctataagctggggaaaccaggctcgcctggacgatagtcgatgtcgccgatgctgacggatccgcagtttgtgccaagaggctagccgcatccgatcgcactgccggttttgtttctttcggtacgaggtgggatatcaactccgtgacgatctctctcaagtttcggcggttgacctgcgcaagaattgttaagtctcgaacagggaacgcaggggcagcatcagatgtactgaccatgctcgagaccagttccaaggcgcgcatccgaatgctaacgtcctcgtcgtcaagactctgcaagatttcttcctgataatcgctaatcaaatgtgggtgggtcggcacgatcttgaccatggccaggagagcaatgtatttgactgtcgagtagaggagcggcgcgtcaatcaagctacatagcaaactttgacgccgagacttcacgcacggttctggtcttcgtcacttaggaagatgctgagcttttcgacacaaacccgagcgagcgcatctccagcttcggtgcggccttccagcatgcctccagtgatgcacgtacggacacactcgtagagcagcgagatggcaggcgtcgtcgaaattagattggtgatgggaggaagcagtttgcgcaccaagcgtggctcgatcggagtcaaggtagcgaacttgagggtgcgaatcaaggcagacgtcggatcagtctgcattgcgggtcggaaccaggctgcaggtgtcacttaccagcttgacaatcttgatcaacatccagttgttactacttgtagtcaagagctcgaacaattgaggggcgaggggcaggaagtttttgggattcgactttctggacagttccgtgatgacgttgacggtcgccgagactacgcccgggtcatcgtcttcaaggcggtctcgtagtcggctgaatcccatcctcatggcatccgggtatcgttcaaagatgcgaaagagcgcaagcaccgctcgtttccggacctgtaaatgtacggcggcagacaagatgagcgaaggtgatcgccgagtgggcctactcggccaaacacgtacatgggcgcggctatgggtcgtcaaggtcgctacatcggcatagacgtcccttgccaaggcaggtgtgacgatgtctgacagccccatcaaagcgagtggagggaggtgagcatgcgaagccagcaggtcctgcaaagcgggaggagagtcgtcaggaaggatcgttcaaagtcttaaggggtggcacccgcacgaccctcaacaaacctttcgtattccgttcacggtcaggacgacctcttcggtatcgaacgagaaagccatgggggcagctacgtagccgagttctatagagacatgggcgggaatgagcaacgatagatggtaccttcgggcagagcggcttgcacttacgcttcagatggtatcgctggctgctcatgacctcgacgacgtggaacgcaaacgaaggaggtggtgctagaggatgcagcatcatgagctacggacgacgaagctttgaaatcagtctacatggtcgatgctatggtcgtctgcgatcaaactcacgtagcacatcttgacgaccccttcggccttgagttccatatctttgcccttcaactcggcccggatctcggccatggcctcttcgaggaaagcatctagttctgccttggacgagtttttgtgcgatcggagacctcggatgaggtcttgcaaggaacgttcccacatgactggtggggtcgtcgatcagttggaataccggcaaaacgtttgttcgagtttctcagaataccgtcgttttgggggagacgctatgattcttctttcggcaacaagtttcaattaggtgttgatgccatgtctgtccgcttgccacttgaccccgggttgtctagttgctagttgtatgtgtagagtgtagtgatcggtgtcgtccaagatgtatcctcttggggaggatgaggtggaacggagttgcccgaacacggatcgatgacgatggggacggtgaaacggtctcccaatcgagctggagcggtatatagctgattgacgaccacaagtcgaatctgttcacgtctgtacaagttgaaggatgagagatctgaatctcggaattggccaggagttatctggtcgatgaatcgattcgagactgaagctgaggataggaagacatcgagttgtcacgaaaggtcggtccagtattcgaaacgggggaaaaagatgatttctcattcgacaagcccattgtgcaggttggtatcgtcactggatagtttagtacgtagtacagatatacagatatacagatggcggtaaagacacagcgaaagaaaaaaacaaagagtgagtctgagttcatctagattgaatcgttatcatggagacacgtcgttcaaatgcgtaaagagatcgtgaatgaggagaaatgtggacttgggtgaggaggaaggcaagtccgacgtagaccaagcagactaggcttcgagatgaccaccatcgaggaagccctcgggacaagtcaaagatgtggtgttggtggtggtcgccgtgcttctgctccggacgacagcttcccaatcgcgaacacggcgggtaatctcgtcgatattgtccgcagccatgacttggtcgaccgggcgatgattcggcgaggtgtgatgtaccaaggcatcgatggtggtgaatgcctcgatgacgttctgcgatagcgggggctagagatcagcaaggtggcaaagcggtaatgactactcgtgctcactgaagtcaggatcggtcgaccgcgaacctcgatggcagggtgtatcgcaccacgctccatcgctctgaccatcttgtccatctgatctctcatcgcctgaagttcgtttttgagaccgcttactgcgtcttccaggtcgtgtcgtgaaagcggcatatccatcgtgcccgtcgccgcaccggatttcgatacccagccaaggggtgccgaacgtggcacaggcgtcgtgaccggatcaacgtcctgccgtctgtcatcagcctcgcccgatcggccttggacgtagctacgcagctgctccacatcgatacctttgacgctggtcaactcgggtggcgttgagggcggagcggatcgagggaaacggtagtccgactcggtctctctccagatgtcgtcggccgcttgcggtgtaggctggacgactgggtccgtcgtacgtgcacggggagtaggcgccggatgaatggctgggaaacgctcatcgagctcggtaggcggatcggattcgttgtcgagaaaggaggtgttgttgcctgcttgttcgcattccattcgctcgttgtcgtcgtcatcgtcgtcgtcatggtgatcatcatcgtggttgttgtcctggtcgtggtcatgattgtgagggtcatcatctgctcttttgttggcatgtcgttcagggtgcagctgatgggtgtgctgcaaggcgtatctcaatgtggcactcgtctgcctcggtctctcctgcgtggacggcctatgtctctgtcgtatcgaggagggaggtgtcgccgaagtcgtaggaatccgggtggacgactcgaagatgctcgtacgcaagggtcgtcgagggctgatgtacaagctggccatgccggctgtttcgatcgtctggtcgtcgagaaacgaatcctggacgaacgtctgggtcggcacctgcttcgtcgaggcgggtgcgggacttgcttcggcatccgaccgagatgatgtggccctgggtcccgtctcggtcgacgaggaagcccgagtaggtgtcatgctgtctgattcgctaggatcgacagagtgtcgcttcagatagtccttcagtggagatccggaggtggatgataggctcgcttgcgaggttcgtattcgccgtcgtggtggagaagtcgggagggcctgtggctcgtagacaagacgtcagtccttgtcagtcactgcatcttgtacgttcgagctggctgatgtagctcaccagatcggcaatgcctagactttcattccggcggtttctggaggtagtagtaccatcaccaccaccgacctcgttgtaatctgaacgtggtaatgcttgtcttcttcgtgaaggatcatcgagcaatgcaagagctcgatcaaacgaggtagtcgccttcgccatcctcgtctttattttgcgatcgtgagatcttgttgtggtgatgtctgatagctagtcgttggtcgtgatgtggtcagagcatgtagacggtgcagacgacgaggttcgaccccttgcaccctggtttgtcaagttctcatagtctactccatcgctggtggatgcacacagtagtagtagtgtttgtgattgtgacgacgaggaattgcttggactacacctatcgatggtgtatgtgcacaagaagggggtcaaatcgttgatcaaggatttgatgaagacgacttcgacatcaaggtgcatcagatcaaagtgaaatggaatggatgagagggatggctgcacggtctcaacaagcaacaagcaacaagtgcccaagtagaatctcaatacaatcctctcgtttgcccacagaggacggcgacctttcgacttgtggtcctcgggtcctcgtcaattcccacaacgatgatgatgacattactactctggcggagacagcactgacattattattattattattacccgccgacctctcacccacgccctggcccccctgactgagcggctcgaggacgacgcgatggtacctcttgaaccgttgttgcttacatcagactgtaacgatcaagggaatacgtgatacgtgatgcatgtgccggcggcaggcatcatccccaaagaagaaagagcgtacgatcaagagcctctagctagaggcctctctagcttgctcgacacggaccgcagtcgtttgcgccaagtcccgggaggatccaaaccggggaacatattacgtcatcacatcccccacccaccccgaagagccgtggctcgactacaactcggccgaacaggtgattcgtaagcaaaccggagccgacattccaggtctcagatgacttgcgatacggtacagtcggtacagacgatgcatcgcaatttcatcgtcgatgagaacggatccgtaacatcctgcagccgggtcggtcggtcggtcggtcgggttcagactcctcgagtatggagggaaaagggcccggggaggacctagcgaggtggtctcaggtcccgctccttacgcacttgagtactgcgcgcgacaatgtcgggattgacaaaccccgtttaagatcgactgttgcctcagcttcgaacgttgggttaggtgaagtgaccaaatacttacgatgccgctggagatccgtgaggatttcgggtccattgatggcatacggcgacgacggcgattcataattccatctaaggaacttaggcgatatcgaccctgcgcgccctgcgcagttgtaacaaggccatttgaactagattctaccactgcctgatggctatacatgatcaatcaatactaaggaactcgggaggtcggcttggagtgtcatagtcgctcttctcgaacgattggcagaatatggatcctcgaaatccgatctgtgagccctcgaagtaaagggaaacattgcccgtctcgtcgcttccggcacccgcctgcgatatcacgaaacctcaggaaagcctttgtcaggagtagagcgggtaggccgcaagggttgactggcatacacaaacgtaacctttccagtcgattcgtctcaacccctcgtgagatgatcgggtgaggggcttctggtcgcggaagccagtttcacgcccttcccccttgggctcgtgataggatggcggcgcgtgagacggggcacaattggaggcgcgtggcatcatcgtgagtttcatgaacccctttcatcactgtgagactcgaactgagaacccgtcccaggtcattcgaggttcatcgtggtgcattcaatgacatcattttaccaggacggaattggttgggaagctaaagggagcgattgtgagccgggaaatggcttgaataatcaaaatagccgcattgacgtgatatgtggtatcaatcgttgccttaagagcttgcatcaagcttctatcgtcattccacgttgtcagtccatcgaatgtatcgaacatcagctcaatatactggtgaagcacatattggcagcgattatcgcttaacaggggagtatatctcgaccctttgtgacgagccccgttgaactgcgtgctcctggccctgtaagatcgcggagtcagggccaacccaacctggaatcgaacggaggaagaccaaaggatggcagtctgtcatcgtgtatcgtgtccgtctgatctgtgatatgtgtgtcagtgacgcatatacgggtatagaggacgagtgtctctcaggtggttcctcatcatcaacctgatcttgccttcaattctgcactcgctccagcagactaaaatcaagccatgttcgcaaaattgttactactcgccctcgtagggctgacctcgtgctatatggaaggatctggacagataatcgattccaagtcgctttctaccaagattcaccttgaaccgggtaaactcgacaaaccaagtaagcgagactttctcacagcacgatggggaccgttcgactgacgctcgacttcgtttgtgtaatttcagtgcagttcaacttcacgttcaccacgcagggcggtcgatcaataagccctgaggcacgttccatctcacttatttacgaccgggcagctacctggtttaccaagggacctgatggagaggaacactcggacaagcaggcgtataagtgcctgagggcgaaggatatggggtaatggaacggggtaactttgtcggccgtatggttgaccaagattacgcagacggagatgatgttgggccacagcttgagacaagtcttcgtctctgacgaagacatgtgtggaagtgaagaattcgagagaccgcctgtacatctatgcggaaggaacttcgtggtgaatggaccaggacaggagctgccattaggatgcgatggtgagtgcaggacaaaccgaaaagtcgtgaaattccaagcttaaagtgataccacccactgttcatcagccgaaggattacaatccgctgaacaatcgggtattccggcaggtcaaatcccggacggtggttacctggtgagatccgtcgccatctttggaccgcgcctgtagaacagaaggattcatgcgatatgtttctgacgcggtttcgtccgaggttataagatgatcgaattcggtccgtcaaaggttaccagattgtaaatcattgccaggatgacaaccaagacgaattttctttcgaccgaattttatcaatctggaacacaccatcaacttacacgttctgtcttctttgcatatgcttcaaccataagatatcgctaaacgtaactgtgcagccgagcttgcaacagatatactcagtattgggccacacatatctgtcgactgtcagtctacttgagccaactattgagcttggcagcctgaaagtccttctgggcagcggaatagacagattgctccaaggtgatgtcggtctgagcagattggacagacacaatgttggtctggacatcgttcaaggctccattgatgtcggcataggttgagcctggcaaagattatttcattccatggcttgtttctgaaatcccgtggtgtgagtagctgtagtagcttgagggtcattttgcgccacagtaagggtgtgaatggacaagcttctaaatcacttcaacacatccaacgtcgagctgtcggaggtaccactgctgcctaatatcattgactgcatcaacaagtccttccgcagagagcagcaccatgcgaagaccatggctcttttcaatgacggcaacaggagtaccgttggagcaacgtgtttctggtgtagggcgttcctactaaacactacatggtgtgacgccaacgtggcaaaggatgaggctcttttcgatctcttgtcaaagtcacaaacaatcgccgcaatgaaccgaaagcacgagcgggttttcatttggacatgtgttcagtagagacgatagtggtccgggcagcctgagcggaggtgatgttggtttgcatctcgttcacggctccttcgattccggcataggtgtgctcagctctggtgagcctctcagaatggtcgaccaccagacctgtcagctgtcattatgtctggcattccctagcttgctcgagacgaaccgagctccctatcaaggacggttcactgtccgtaacgacacattgcttcgaaccacgatcccctcctcaaataggtcacgattgccggggtaggcatgttctcgaatctccggaacaaccaggcgtattagaggaaggcgagggtgagagcggagcaggcggtaggagggtgggggaggattgcgaagaaagcgtataagggctgtgaagccacggctcaggccggtgcaaggagtacgttggcctcgatcctgactgtctgtgccgatattctgttgtatgtgtccatgatcacagatggcacacggggagcgtcgccatgaccaagtggagtcaagcagcgacgcagtccagcaagagctcaaacgccctctgttcacaccaatcagtccgacgagcgcctctatcagctacccacagacaacaatggaaaacatcaaagcgatacaggaaattccggccagaatatccttcatttgttcagaggggatagtactccgggagatcaggctgacacatcccctctccaggagcttttgaggccaactcgtcagctcgtattcgggtgcgtcaagcaagtatgatactgctgaagagtagtgaattcaattgcgatgcttaaagagcgagaagatggttgcttcgttatggatgcttgcggctgacactgtgctactaagaatacgccttaaaatcgtaaacgttttcagcgcaacttgattctcactgtctccctacgtcggtcgcggaagaaggatgttacacgccatagagcggcccctcaatcatatcatgtcaggatgagaggtccgaccaggcgatacagacacaaggttagcggaatcccgcaaatgaggacgatagatgggagcttattttatacggtatggaattcatcggggagagcgctagcaattgaacaatggcccgtcttcttgagcacttcgtacacacaaggaaacttccgggattcaaggaggtccagtcgactcgagccttgaaggcatcagttcgccatgaatgttccaatcaccatgctcctgtctatgtggtccttcgctttcatcgaagacccctcatgtcggaagcatcgatgctacgatctttcgttcaaaagcccatactctgcgcccgccagggcagaggtggaatgcgacaacttagcacataccatacttctcgagaactgatatgctctttgtcagactgaataattggacaaatcggaccaaggtgcaggggaaacgggtacaagagctgaattcatgcacgatgcgtccggttggctgataccctgcgtctaatcatcgacacatgactgacgacgaacctacttccggtgtcgaaactgctgggagcgagtctagaactgacggtggtcacacaagccggacctgttctactttattgatagagtcatttgtgagagtgcttgatctgcgaatgctcatatccgtaggcgcaaatgtgcaccttacgtccgaggtatcgcactggccgggtcaaggttgctcggcttcgagacatgcttagtcgatgaagaatgtctagagcgaagggatatgacgaatggaaaaaatctaatgcttgttgagaccttattaagattaccagtcgccgacgcctcatcgaattcaaccgttcccctacaaacgcgggtaaatgctaggaaatcttcggccccggacaccaacgtgcagatcggtactcagcctgaatatgataggtcgtttcacgctacggtagtatctttcggggcgatggtatcgtcgtactggagctatgatatcgtacgacactatattgtaacgatactataggacgttggtcgatgctggtgcatgagaccgtcgacagaatccgcctgacatccgattctgagcctttattattgtgtgcaccaggccagaccagatgatcaatcaatgctttccgctgcacgaggtcgttagcaatatcacaaaactgtcccatccgctgatcgtcagtaaagtacgcggatcttatgtttaataggactatacgatatcccgcctggcctcatgggtccagtcgggttcggtcattttgccatttggacattgcacggatgtgctggagctccgttgcatgaacgttcagcatgagcgtcatacagacattgcaagcgatacagaagtctggccaacagtataaccctgctatagactgacacctgccttatcgaaaaaaacggcatagcagacaatgagatacttgacattctccggtggaaatgagtacaggcagggtagggtctagaacagttcttcgtattcgcatggtgtagtatttatctgtacgattatagatatacaagaagacttcgtagcatcggaagaaagtgtcgacggtcgaaaccgtatcacgatggaggtcggagaacggaacgggtcgcagtctcgaagaaagtttgacaaggaaatgaacgattgggatagaaggtaccgaaacgagagtgggagaaggacgaaacggaacgcgaaaagagtgagaaggaaaccgataatcaccttgactgatcccgatccttgatgggtcctcgttccagtggacactgttgagcgaaaagcaaacacaacgggtcatcttgaaacgggattgagcgtgaagtggttactgacaagcgagttgcgaagaggctcggctcgactcgcggggaggggcgacccggaggaggttcaactcgaactccgaggaagagttgccggtttgacagaccggggaaaggcgacccgggtgtcaccccgaggagaaggaccggcggctcttagcggcctaccgggggacaggcgaggtttatgaaggggccgagctaccgggaaaggcgactgaggaatgtagacatgtcagtaggagccttgcaagcatgaaggacgaaagcttaccgtccatccgggtccggggcggtccgaggcgtgtgaatcgggcatctgggttgggaacggttcggtgtgagcttaccgcaaggctgacaatgtgcttcatgcggatttggtatggaaagcgctgttccgcttctacttggcgactcggtgcatagctccgacaggggccatgctatcaagcaatagaattgccttgtcgttgacgtataaagactgctattgaggcacaaggaaggtaggtcacatgcgattgggggcgttgcgatgacacgtcgagcacagctcaaaaggtacgaaatcgaagaacgagaattggttccatgacacgcgttctcgctttgtttgtcgaaatgtgcgcggaataggccaccggtaccgtcgatcatcgatgatcgtccagaggggtggaattgtcatgctcgtcccttggcatagttcctcttgacaatctaagtcattgaattgacgagattggcctcgcttaatgcaacatcttgccggaggtcgatcgagatctatgctctgttcgtaggcgatctgttgatgtgcgcgagttggcccgcgggagattggatctgggctggtggatctccccattacagcgcgggcacacagatgccgggggtaaaagaaggaatcaatgtactgattgattgatcgatgacagcccgtactcctgttcctgctcgcctatcgttcctcatcacaacaaagtccggctagactcgacataatcgtgtttttttgatcgccggagctcctgaaacgcgaaatgatcgcgctagcggtcgggtaacgtcgaccgtgccgcgcaaagaaggtggcgcgatcacaggtacacacagaaagatcgattctcatcaaatctcatcaaaaatcccataacaacagacaacaacatgacgacggtctcggagggtctacaagtctgggttctacaagctcgcgatcggaatagatcggattaaaatgggtccaaccggatgactccattccggtacgacaaacaaggtcggaccgctcgctgttttccgaataacgggtcttcgatcgtgtaatcgagcgtgcgtgtccagtcctagaaccggaagcataggataagacagatgatggtatcatatctcgagtactggcttacgagtggatcaggccgtcttcttgcttttgtgccccgcttcgtcttcgtcaaccgccttcctcttcgctttggaacgatctttgagtagacctgcgagattgcttgccgcgacctcaggcacctcgtagaaacctttttgaaggtcttcgagcatgagtttggcctcataggccagaagtttctgttttctcaagtctacagcccgttcttccgctcgatgcctggtaatcatcagcagtgttcgagtgaccgtcatccaggatcactcactccaggacaatcttctcgattactacgttctttagctcatcgacaatctcgttgcgaaccccatccactttcgctttcaaatcatccaattgggccgcatgtgtgcggcggggttccatattgactgttcagagtcattcgtcagggattattgggaaatctatttggtcggacttacagagtgtagggaaaggacagtgtttatgtatatataggagatgggaatggtgtgtgcgtgtgtggcgtaggtaggtagcgagtagagtacatgtttgtcatgttcgattcggtccgcccatttatctgcctagtatcactcgagtcggcggcgattcggtcggtatttctttgataaacaaatgtcgatacaccgcgataacacgacgaatgtgacgtgtcaatcaactgttttactcattacgaacgggttatttacctcggctattggcggccggggtagatagatgcatcgacctgacgtcaacgagagcggaagtcagtgtggtgtgatcgaatcaaataataaacgttacagccccctccacgacattcagctaggtagtcactaagtatcaagcggaccaacaatatatcatgatccgtaccccgctacatagcattctaccgacactccgggttcctcttgtatcgggaccgatgggtggagcggcaggcggaaagcttgctgccgaggtctcacgagcaggaggattcggcttcatcggtggaggctacctcacaccagcccaattggaccaggagttcgatgtagtcgattccatactcggtcgagagattcctccggggcaaaggcgagaaattggcgtcggttttctagggtggaaactgtctcagctggacagctcgacaacggcggcttcatcgactttcgatccgagtacgcggccaaaagcatttgcctgcatcgatgcgaccttaagaaaactgcctagagccatctggctagccttcgggacggcgagtgatctctctggttgggcacaagcattcagagaccgggaacagaagctacatggagatcggctcgagccgtggaagctcttcgtaggggtaggtagtgagcatgaggccaaactagctgtcgaggaagtgggggcagatgtagttgtagctcaaggtgagtcatttgatatcgctgtaatagtgtgcagacattcacggatggccacctttcgcaaatgatgatactcaggaatcgaagccggaggtcatggaaacggctcatcccctcctctttcgacactcctcccgcatattgcacgtcaattgacgtcctatcggccactgagagcggacaccaagccagtcgttatcggggcgggcggactgtcgcacggcgagcacctcgtctcgtgtctcgctctcggcggcgtaggtgccgtatacggtacccgcttcctattaactcctgaaagctgctacccggaggagcggaaacaggtccttttacatgccaaggaaggctcgaccatccgcagtatggcgttcgacgaagcgagaaacactctggactggccagaaggggtcgacggacgaggcattcggaatctgactgtcaaggaatttgaagctggacttaacgacaaggccgccaggcaggccacctatatggaagccgagggacggggagacgcagaacggttgatagtctgggccggaacgggagtagggaacatggacaagatcgcagcagctggagatgtagtacgcgaactggagcagcaagccttgcgctcgatgacacggatcactgcgatgtttggtgtgtagtacacagcccggcggacgtcttgatcagggaagcaggaaccatgtcgagttttttattatgctgttcggcaagtcatggtctatgttgtaacattcctttcaggttcctacacctccaaatgtgaacctgtgatgcaaacatatgagcgtagtcgaaaggagcagcatccagtaggacgtaccatttcgagcgacatgccactgcctcccttctcacggtcctcttcggatcgtcgatggctttcgctaattctttcaaaactttcgtcttgacggtatgtagcacatcgtatcgaatcgtatccggcagaatgcccagacaagccaatgcagcgatcctcgtcctctgcaacgaagagacgtcaacggtgctcatgaggatagcgtaccaggccgacttacgggtgagctactgtcctctcccagatccgttgcggtaactaccagaacgtctgccaaagactttgcttgcgatctcaaaagggtccccgttgctgcgtccccttccacctcgaggacagagctcagcattcggagcatgttataacggatttcggggtttgacagcgttagacctcgcatgatgagggggagcagttcgctgaggtgcgacgtgatgaggccttgaggtatgatggtgatggtggagccgagcgctagcagataaggggtttgagtggatccgagctgagtcttgcttccttcgatcatcatgggtaggagagagctgaataggcgttgcttgtagagagactggtgtatgcaattcgtcaaccaccgagagcaagctgaatgccggtcctgtgcatcgctcaccttgactactgcaaagttctctttcgaaaggatacgctcaccataaggatcgcttaaaatacttagagacgctcctgcgtaggaagccatgtcgttctggcgcggaaagatgtcgaagactcggatgatcatctgaagaccggccgcatgatttcgcaccagcagagctcggccaatctgaaggggatgcatgtgagtagcctgttccggccgagagatgccgctgaacatggtgactaacccagatccagatcgtcaacgctctctgggcgaggtttggttgtccatcagcttcgcacaatgaccacaaatccttctgcactgccgcaacgaattgctcgagatctatacgcagcgcgtcagtcatgcaggcggtcgcagtagctatactgaatctactgacctggtgcccgcttgttaaccaaggatgccattaagtgacagacggatactacctgtacttgactcgttgcgtttcgcgtcgcccaaagcaagagcaaatgcagaacagcgtccacgtcgcaatcgatagcctccggctgcagagatcacgccaggtcaatcttgcccagaaaacaaatccatggcgagcgggcttactcggagcccggctacatctgcggtaatgagaatgatgagattctgctcgctgttagaggcgtgttcctaggacagcggaaacagcaatcaatccagtgcagcctctcgatacctcaaggacgactgactttgagaggtcccacacaagaacgtgtagcatccgtgtggtgtttgccaaatagaccggccatgtcatcatccttcaaggcatggaacaaagcattggcatgcacgctttgctgactagaatccacaccagatcgatgatgataagtgccgcattcacatcgagccgttccgactgcctacttactcgctcgtcagtgattgggtcatgagcatcacgatagctgctccttccgacatgagccgtgggtcgttggctatactgaggtccgttctcgagccttcagcgaagatgctgtataagcgaggtaccaggctctcgtaatgcttcgcaatgtcgaggtgtttgagtgtgatcttgcgctgcagagtcgttcggacagcgtgaagcagagagaacgcataggcgacctgacattctctccgcagagcatccgaatctacatccatagcgttggcatcacccgcatctgcagtttcgcacagcttcgcaacttgccgtaccagccgaaggtgaagagcgtctagaagaccaggttgcacgcacaaggtcgatattgactcgagtacttgacgaatataataccgctccttgtcatcggacaaagcaggcgcctgatccggcaattggtcaaacaaaagtggcaatgtatgttcctcgatcggccttgtggtgagtgccgagatagcagacaatgtcttgagggcctcgtttctgcaaagacggatcgtagtaagcgatgcacatcgctggaggagaaaggtgtctcttactgaagggcctcgggttcccgtgtcgtcaacacgccgtcgatcttgctgacaagatacatgacttcttcagatgacaggaaaccggaaatgtaaacaaggtgttcggcgccttgaagtcctggcagtcgacagtcctgggcccgactatcaatacccgagctcataagactgagcagctcgtctctataattttcgatcgcccgctcgttttcgtgacttcgggtgctcccctcgctcgtgtatgcttctcgtacagacttgatcaaatccgcaatagcactgaggactgggccgcgcttcggcacttctgagtcttcatgatacatcctgaagagttgaggcagcacttgcgatagagcatacgacccaatcagggctggaagtaataccactgtttttagtcaagccggatgaacgctgtgtggatggtcggacttacgggaggcactgacgcaagccatcaatactttcgtggcgggctttgctttgctcttctcgggctccttcaattcggcctgacattcttttatgatctcgagcgctaggtcggctgctttcgtgtcggagtcgtcggggtagagtgtagcgatgagagttttgagcgtcgtcagagcctctttctcgatctctgcatcaggcgaatagaagatctggcagaactcgcccaatgtggtcagatcgttcggtccgatgtcttggcgaagtatctgggcttacctctgtcctgagggcgtcccatagatccgaagcatagccttgcacagcgcgcgctccaaacacaggcaggcacgctgtcaaacccctcagaacgtctttcttcgattcgcccagacttgcgggtagcttttccagaaacaagggcattgccatgggagcgaagcggggagtagccgacatggcctttcggagtgcatcctggagatcacggggagtgatattgtaggggtcgttcgggggcggcctaaaagtgatcggaaagtagcagaatatgatgtcgaacatgtcctgatgcagggataaatgttagtctattgtcgactatgcagtaggctttatcgccgagacccacgtcgaggtgtttgtagggatcaaattcaatcaggatcactcttccgatcccaaacgccaagatgagattccgaggatccttctctccttctgccaatttgatatacccagagacaaattcgtcgccgagcgtcttcatagcagcaaggtgctttgcaagcagagcatctacaagcagaaagacgagatggcgtgttgactggacatgtgttttgctcttgaagttgcctgctagtctgaagagacgattgaactatcaattccatgcctgttcgattggttgatacagctggacgtacgatcggaagacttgactggcttctcctgctccgaaagtcggcagcttggcgagtacgaccaagcctctcaaggttgaaggtacacattcatgatcctcgagcttgtcacagtaaaaggacgtcaaaacttgagctgcaggaacgtcgcgcggtgagttgtctgtattgtctcgtcttatatcgtcaaccctggactcactaccctgccggttgattcgggcagctggggccttgtcaagcacattcgacaggagcgttatccctgatttgagggatctatcggggttagtccccagtttcaagcgaatgcatgttcaaccgataccagatagtctcacctttcactctgacctcgtcttcggtcgacgtcagataatcaccgagcgctctcactatctctagcagaccaacttgaccgctgcgtacggctgataggggaacaagccggtcagctcttgcaggagagtatccgcctggcgttagcactcaccgtcaagcagatcctgtgggacctcgtctaccgaatcattggaagatatgtgagtcctcacgattcgctcgacgtccatgatgctgtacaggcgttctgttcagctggccttgagcggaatccgattgcggatgaggagaaagctcttcaaagcttgagagcggattgtagatctagatatctttccagtaccgcaaatataagtatatatgtgccaacgtgtcctgttaatatagtgtctaaatgatctaaatgacctgcagctgcaacttaatatgttacgacttgcgtgctaaacgatatcatatcgatcatcgattctatgctagctgctagctgctagctaatctagctagatgctacatcgaatctcccgaaatctcgcttacgtaattgcttgaacgtcatgctatagggggctgacataccagaacatcatggttcaatggtcaaaggctcgtctgaatacaactgcagaatctaggtacatctcaatactaattccgaacatggggcgtctgggtgatcgttattccactggggacactcctgcttgactgtcctcgacaggttcatggctgacgacctcggcgtaagtttccatgatcggcttcgacccgcctgcctcgcggggctcgcccaactcctcgtcatcgtccaagacggcactctcgtttgccgggtctccaatgacctcggaaacctttggtgacttgggcttgtcgtctgatgcagatggcgtctgtcctacgatcggaaaggccgtttcgtccgaagaagactcgctactggattcttgcttgcccgctgcggctgattccgtcttgtgatgcggtttcgcaatagatgcatacgaagctagaggcggagagacagtatcgctgtcgtcgagatcaactccgatgctggtcgccgtagtgggctcagtcttggtcttagcctttcctccaggccgaatcaataagctcgacagagtggacgtagatgcttgggtggtagcatttgcgttgaaaacggattgaggcaatgtacccgtgctcgcgtgcgtcgtcaatcccggcggtggagtagtgttatgacctctgttgcgatcagatttttcggacgactttccagccattgacacgtcacgaatggcgctgggcgaaagcggggttgtggctgtcgtcggaatcccagcgtatgtatgatgcttcgatagtttgggcgatttcatcgacagccgggaggcgctctgctttggcgaggtcgaaaagaagtccttcggatcgtcgtcctgagtaacgctatccctgtccagtggttgccgctcaggcggagatgccgaggtgccagcgtcatcggcttggcaagcgctttcactccgcgtcacatctccttcttggtcactgaagacggcgtccacctcgtagcccttgacctcgagcttgtcgtctgccagatcgatgtctaccatctcagactctggttcgctgtcgtgaggccgagaattctgtttggccagggcttcggctcgagactgctctagtagcttttcaatatcgacgtcggcctcgatgccgagcatctctcgaagcgccgtgttctccgagttcaacctcacaatctccccttccctgtccaatgcccagtctcggcgcccgaacgttccggtatacccgcctgaaggtgtcatgttcccctgccagctgtcgtacccaatggtggatggtgcacgaggaggatgacttgcagaaccagcaattgagcgctcgttcgtcgtattcacgccgcctgtttgaggtcgggccgtggaaggcaatcccgctattgacgaagccggagagaaggtttgcgatgactctgcggcaggtgaatctgacacgtccaaagtgagctcctctatcgaggcagcagcagcaccaagcatctcccattcctcccgactgcccgaaccgtcaacgtcctcttccccgttgacgtttcgcaaggccatgcggatgagaatgctcaaacgttgcagcaagagcgacagcgtcgtggtatccagcagctgctgtgacgattgtgccgttctcaagctatgtaagagggaagtgtagtattgatggagggaaagctcatgctttgttgccgcgtgctgaagagaccgatatgcgtacatgagctttttgataggaaactctggtgaacgtaaaccgtcgaccatgcttaccgacactgagcggaatttacccatcactccttccaacacgttttcatagtccttgagcaggatgttgagttgcttgttctcatatgtcaaagtctggttttccaggacaaggtgtgacgcaaactcctccagctgcgttgagaattcctctggagcgatcgagcaggcagcaagtgagcggtattcaacaactaccatgagggcaaagaggcagactgaccatcgctgatatcgatattgaatcggcggagcgggaacccgacaccagtatgagcagcctgccctttgactagactcgactgagaccgtagttgcgataacagctgattgttactgctgagttgttctaacgtgacggcgtaggttcagcacttagtgcttgcaagaggacctcgttacccacctgaaagctcgttgacgatattccacacggtcgaaagatcttgctcgagatcatctactgtcttgaccattgtaaaggtgtctcgagacaggccaatctagatgaatctctgaatggttggtttgcttttgtatgtgtgatgcctcgagcgatctgtgggattctgcgcacggttgagacgtggttggcctgccgtaattctgatggcagtatgttgtcgattcaatgaccaggcagatgtgctgagtgtggaacgtaaacgaggtgtgtttgatgactgatgtaggtactataccagaagaatgtgtatcgatagcaagctctcactttctgttgcctggttgacccaggttaaagcagcaaccgcgagacctcggcgtccgcgtcatgcacactactagctactagtgcggggaccgtccaagctagctagctaccaccatcccatatatctcgaaacatggcacatctcttcgtcatcaccctgtcgactacgctactgtgactacccttcagagcagcggggtataaacaaactccaaagagactgtaatccgtggttaggagacacctcgcatcgccgattcgcaaggcagtcaggacctctctctctagggaatgtcaaatccgccgacgggtcttcaggtattccctggacaacctgtatgtaacggaccactgcccgcgtttcagagagtcctcgtcaacggagattcgttcctcgtgagtcgtgttgctttcaattcctgatgcaagctgctgaagcgatgtcatcttcccggtagatatatgcgacgaccaccgggatcgtcttttacacaccgttgctggactatgtctcgaccttcccgtttcccacagggctctcttacgaaggaaccgtatccggagatcacaaaaccgactgcttcggattcgatgcggatcaagatggtagcgtgagtgcggcttgtccagcataacgacgcaagacggttcgctgacttcaggcggtcacagattttactgtggaagtaccgaaacgcttggataattcgagcggagcctcgtaaagctcgagtttccagcaaggaagaccaggagcctccgaaatggaagctccatagcgagatctgctcccagcattctatccacgctgcccagctcgtcaagagtacgtgcttgtcagatctggcgtagctggcatgtacctttcgctcaagttcacactccgggatacaggcagcattcttcttcagctgaaccacccgacgccctcgatcgaagtatggaaattgaaggccggtctgagtcttccagtctgggagcggaaggcgatgctgtaagccgatctgcggccgcgacctttcgacaaatcgaaatttcggctgacagtcagaccgggtgcatcacgaagagaattgaagacacccgttgtggccttggctttatcgccttgccagacacattttgcgtactgtcagccgtcagagccagttgctcgtgttcaacccttgaaccagcaggggcagttaggcggtccactgcagaccctgcgacacccaggaaaggagggtatcagagcagtctattggcgaggccaggaggtctcatggggagcgtcagattctgatcccgtagagtgggtttcgcttgaccgacgagaaatatattccgaaatctaatcgatatggcccagcagcgatagtcagccagcgctgttcacgttcgacacccgcaatacgctcaggctgttctcgcctgtcgtcgacgcgccgcatcactttcaactcgttttcaactaccgactttcggcgctcaatgttccggacagtatcgatgttcggaggcggagacaggaactactgacagctgaacacggcctcgatcaagcctatgcgcctttctcgatctcatcctccggatccggcgacgagatttactggatggaccgctcgcataacgtacgcagcgtacgattagagggctttgaggccaaaccgccttcggttctgagggtagagggcgaaaagatatggaaagtagcccaatcttccggcgatacaatggccgtcccggtcgctacccagttgatcgcggtcgatgtaagaaattcctgcacattggtcgccgaaacggacaccagtaatcaacagacgcatctgaagcggatcgaactgaagatagagggatgtcggaactcaaagcaggtctttctagggcttagtgaagaagcaggaactccgtggcgagaagatcgattcgaaagattcattacggtcaataagcaaggcgtttgtggtgtatggcagacgaacgggacatccccgccgggtctagtaggtagcttgaaattgacaatcaactcgaagacggtcgatgcggtatgcatgatcactcgcgaggggccgctcgtctactcatcaggcacacatatacaagctgtagacctcgaaacacacatgcccttgtggggggaggacatgtcggagcggtatccagatataggacggatgcgcagcatccgaagattgggcgataccgatctactcttgatttcccatgaaggcaaggctcttagggccttcctagaaggttcagccagctcctcacccaggttcgaagcgttcgatccgcttcccgcggcaccgggagcgttcaggccgatctcggagcaggaaagttgtcggatcgtccaggcggcaggtccgttggtactggacgcgcaggatctcgacatcgttactgttgcaacaaccgagggacggctattgtggattaagattggaccgcagggaaatactattgagcgcagtttgcggatagcttccgagacaatggatatgctggcggtagctggtcggcggaaagctgcatgcggtgagtgtctagactggtcgagcaaaggccaagctaacgagattgcatcctagtgagtgacggggaattgatcatatgggatctcgaggatgctacatacgcgaatgccgctgagcatgtcgaagcgctgccgtacgtttgtccctctagcgcaacctttggtctggcatttacccgtccactgtattgcagtccagatgttctttctctgtcatggtctctttggggcgaacaccttttgctggctgtaggcactccccgaaacgttcgagtgctctttcaaggtcggaccgaccccgaccagctcaacaccgcatggtccacgctcttcgaaatcgagctcagtgctttctgtccatatcctctatcgagctttacgactattccaggaggtcaggtggtcatgtgcgcaggaactcaaattttgacggcacaacctacagctgtgaattcggaaacactctcccaagggtgtacagcccttccagatttccaccggttccaactggagcaatgtgtcgtctggaatcgcgaagagcagattcataatattctccttcgactggacaagacgttgggaggcgtgtcgaggtatgcaaacttgtcgcccgaagagttttggtcagccgacaaacacatcgacgcggtaagagcgaaaccttcgattctacatctgcctaagctgattatcatctggctacaggatgagtctcaaggggatggtgacgacttgttggcccagcgaaagcagaatgacatcagtcgtggacagacccaggactcggtcctcaacgtacgcgaagatcggtatcctttcctgaccaatcggaatcttggcgcattgggctggtcccggaaacaggtccgcggagtggatcgtatggtcacggtattgaaggtcgtacgtaatggatacgtggcgtcaggctttgctgtcgccatcgctgaaatcgctggggcgactacatagcttgacaaggaaaccctccgcctcgacaacttcggcaaaaagtatatttccgctctgcatatgcgagcttctggcccctctcgtccgtcggtaccgtttcgctatgtggtatgggctctgcacagccggagacaggcggacttgcttcgagccagtacacaatactgggaacaagaccgtttgacatggactgaagcgaaacgtatggggacccctttctggttgagcgatattgaagctctcgtgagtatccgtcggaacttcatctttccttacgaactcctatttaagtatcgtgacttcgcagcgcggacatgcagatcaaattgcccggaacgaatttctttcgtctgaaagagatccgatttcttgctccttgctctactttgcgcttgacaagaaggcaacggtgtacggtctatggagacaggcgtacggtcacaaagaacaacagtctatgctcaagttcctctcgaacgactttactgaagaaagatggaaaggcgccgcgctcaaaaacgcctatgcgctactcagcaaacagcgttatcgtgagtacataattcggcctctcccggtcgtatgatcgctgatttcatctttgatgctatagaatacgccgctgcctttttcatgctggccggacaaccgaaggacgcgatccgaatatgtcttcgacaattggacgacctagaaatggccattatgctggcgcgtattgctgattacaaaactgaacatcccggtgaccacgcgcctacactgttggaattggacaagcaagacgaagagagacccgtcccggtctgcggagaaatgcttcgagaggtgattgagaccacgatattacccaacgcacaaaaagcgggagatcgatggctcagccactgggctctttggaatctgggtcagcgagccaccgccattcgtcacttaacgctgccgcttcgggacgttggtatggaacccgaagacgctgataatcgcatcaggggcgttctgagcggatctgccgattggatgtctctctactatgaccttcgtcggcgatactttgagacagacaccaacgccaccgattcggtggctcctttggaacccgagagttggctcactcggacggaggaatgggacatggtccgccatcgttcacagcggttgtgggcaatgggtaagtctagtcaagatgggccgtaaggctgtccgactcaactgacaaatcataataggcttttggagcctatcgctggctataatacgagattggaagtttgtggccatgaccatgccatcccgacatcagactactggtggggatacggcaacatacggcgccgagacggatcgagggaaaaagcaaccggactcggaagacgatcaatccgcggccagccagaacgcttcaacggaaacgcctctgcaagatggacctcagaatccgcctacaaaactctcactgttcaaggagaacgcggttgtggtggattcaaaggaaagccaaggagcgatggagtttgacatgtcgtcgttcttctagttggcgcgcatactcaagggggtctgtggtgttatcatgaaatcaatcgatctcgtcatgatatagataaaagaaaaacgaattcatgacgtgtcaaatcactcgaaaccgctatttatcacgattacgcggcggaactgccccgttcatcatcatcgtccctcgtcagatcagatgaaccctttgaaaggctatggatctatgaagctatcgatcgcatagggttttccaaccacaaaattactaggttcctcacagttacgaagtatcttcaattgacaacatgacagagtgctcgtttggaatcacaggtaagcgagtgcgctcgccgggagatttccaaacccatagcgctaaccttcagcatctgtgcggcatcgatctatcctacctctataggcaaggactttgtcctcctcgcatcagatcaatctgctgggaggtctatcatcaagatgaagtctgacgagaacaagatcaggcagctcagccccagtttgtgcatggcgtacggcggcgaaccaggtgggtcctcatcgacgatgacaccagggtgccacttgatacacatagctcacgctttgctgtcctccaggtgataccgaaaactttgtggactttgtcgaacggaacttgcgactatatcagatcaggtgagggcacggcttccttacccgcctgccgctttgcgaatgattctgattctaacgctattctggcgatattccgtccttaggcacaacatcgaactcgctcctgctccagcatctgcctatatccgaagaatcctcgcagaagccattcgaagtaggcgcccctatgccgtcagtctgctcttgggaggatatgacaagatcaaggacgaaagtcacttgtgagcattcgggttatcgtgatacttttcgatcaaggctaatgtgcccgtgctgttttatgccctaggtactggatggatccttatggtacgaaggtcaaggtgccttacactgcaaacggtcttggaatctacgtggccttgagcacgatggacaagtactggtacccggacattactcgtgaggaggcaggtcagctgctcaagcgatgtatcgacgaggtcaaattgcgtcagtgaacagagatatttctcactaacaagagaccattgctgatcggcttatggttccatggcctgacaggactcgcctatcaattctcatttaatgcagtcgagatcgacaaagaaggggttagagaatacaagctcgatggaaccgcatgagcgaggctgtcgatatggcattgccaaagcaaagttccttcggctatacgttaacgatatacaatgtaatgattccatttcctgtctagccttccgattgatacgttccgtttgctttgcttatgacaacatagcagtggagagtcccacaacatggtgcgaggcaatcccttcggcaatactaggaaagatacgactccgacttgccgtattggtcttgtccacctttttgcctcaactagagtcgaggtcgctgcagtgagatccgcgcctgctgatcaggtctcgaagatgccgagtatctcataccatgccacgatttgggaggtgccgttcgtggctccgcacggccggcttttgaatggtcagccttcagtcctgagatatcgctagtcttcctccatccggacttcgtcgccgtcgggcttgtccgtcaagctcttcatcatccccatcaccccgcccaggaacgaacgcatttcgacaatctcgatcggtgtcaggccggtgagcttgaggtattctccaccggcggaaaagggaccggtgtctgttccagcttgcgttggagcgttggtggctgagggaagtgaagggttcgatggacgcagaccggtacgaatcttggccagtcggatatgtcgaagcgatagtaagagagagtggagctcagaaggggacgccaaatcggatgcggcgctgtcatcaaatggccgtaagatatagcacatcctcggaaaagataggaccgttcgggcaagctacttacacgtcgagaaggaccttgctgacctcgatgaaatgcctgggaagggggacgaatgtctgcggattctctttctcggcttgcatcaaggcttccaaattctctgcgttggacataaggatatatttgttagagcagcttgcattccagcagacggacttctacacaccgacagttagccattctggaccaatgattctgcacttcttcttgcgtttcagggacaatgcgaaccacaatggtacgaccgcttttgagggaggttgaaaaggtccgtacacgccctgggtaccattgtggaacaaacagacaaacaaagcgtcagcaattgtgaagccggactcgtgctgcctgtgtacgcaccgatatcagtctgacccggctcatgctaaacgagggtacgatctcgatgagctcttcttccgcaacaaaggtcagttcttgcggcgaaggtgacaggaacagctcggcagggagagccatcgtgcaggaaagatcaggtagtaattactactagctgagcatggagcgtggatgagatgatcatgtccagatgcaacgatcaaatcgacctcatgatcatgatgtacatcggcaacatgtacgagtacaagatcttatgccgacgccagttcccgcacgcgagcgccgcttgtaggcaggctagggggtcggggctagggagaaccgaggatcaagttggatcgctattttgtagtactctgcttgcttttggacagacggacatgctcgcttgatcgtctgctagggacaaaggccgcagaaccattactagttgctgtcatgttgccgtcttttgtacgacaaggagcacccatccgctcggctcacccttcgacatacgcactggtgctggtcaccttactctcgctcgtctttttcctctctccatcacggtcggctgaaagatcaccagtctcgattcaagacgtagtccagcacgagccagtagcaaaggcaacgacgaataggttatatccccaagtcgtcgttctcggcgattcgattgcagagaggagttttgacgaggccgagggatatgggatcaagttaacgagcatggtaaggaatgcagatcatctatttcgtccctccggctcacggagcatgctctccgtagtacgctggaaagatggacgttctgaaccggggatacggcggctagtaagcgtggaaacaggcgttgcacacggggcaatagctcaaataacttattggctcgcagcaactcccggcaactgctcaagaagctgaaagaggacatgccgcttgacgacgtcaggcttttcatcattcatgtcgggaccaacgatgcgtgagtttttcggcacaaagctcgtccagatgcatgagctgactcgactctcacaatgtatattagggtcgtctttggagagcagaaggtgcgggaggaagcgtcagccagtcttgctgattgcgagcggtagctcacacgtttgctgctacagatcgaaggcgacgagtaccaaaagaacatgtttgccatcctggattacatctcagaagctcatcccgctgctcgcgtcctatgtgtcaccccatcgacactacagccggattggtggctcgcccatatgcggaataccaaagtctcggctggagagggtggtgcgcaagagatgactgaatccgatcgaacaatcgctagcaacaagaagtacacccacctgttgaaaactatcgtcagggagtggaacaaggtgcgggcggacgtaaaggacggcaaccagcatgggaacgggaaaaaggtggccattgtggatgccttccgagcgcacgccatcgccaagggccagcacggagtgacgaacgagcaactattcactgatggactgcattggagctccaagggttatatggtgagtcggcgctgattcaggaatggtgggaagcatgaaactcaacaaagcgtcctgcagatcgttactagggagatcctcaggatgctgccagttttcgaagacttgatccccggcaagctgccttatgcatacgagcactggtcaaagtacagcgtgtgagacgacacaattgtacaactgtaagagacagcccttggttttatcacgttattttgttgtatgtggatcgttacgtttcgttcgtctttgcgattacaatcggagtacgtgggcggtctcgttctgtttttactaatgctcagaagggcaatgggttacaacaatgctgggaattcctttctttctgactttacgtttgtttgatttccgatatcaggacgcgtcgcggctcgagtctcatttgcagaggccttcgacattggcgacataagtgtcgatctcaccctgagcggggtcgatccagaccgtcttcctaaacgtctccttgccgatccactggaccgacttggatttgtcgccgagcacgacgatctggccgaacggcaagagggcatgccagggtgtcttggcaagggcgtccttgaccttggatccgtcttgctgttgagccgaggcggccgacgagatccaggtgatatagtcttttgacagtcgtggcgtagggtcaccctcgttgacgatggcgaggcagaggttggtggaggcgttcttctcggtaaagtgacgtttgatgtcggtggtcgacgcgtctccttcgagcttggaggtgaagaggctggttcgcgactcggcccagcgagtagctgccgccccgaatgtgatgaggtccattccgtgtggagctaggtctggatatgtggaggatctatccgataagcttccaggtagtgaatatgtgattgtctcgccccgtagctcacccttgtcgctctccttcatctcgcggaggagctgcatgtaaacccagctgaccacggcggctccactaccgtgaccggtaaagacgactcgcttttgtctgagctgattcaagagcgtggttcgaacttggtcaaggaggtcgtgcccgtgagcgtcaaagtgggtgtgacggtcgatctgcccgtacgcggaggggaggagatatccgttccgattgagccatgtggtcctgtcgtatacaggcgacggaggggactcaccagatcgttgccgttgtcgctatcgtaaggcatgacccattgagcgtcggcttcgcctttgacgacccagatcgcatgatcaccctcgctcccctctttggctaggttggcgggtttgaggaggatcgagatgggtccctcgtgagatccgccctgaccgctagctgcacccgagatgacgtgcgccttgaattgcttgtcgaggacagggtggagagacaggtggtgattgtggaaatgatgctcgagcggaccgaacgaagctcgtcgggtcttggtcaacgtgggcgaggtcggagcggcccgggcggattcgagcgtatacttggagatggcctggcaggcttggacggcttgcaagatgcgcgccttggccgagtcgttgctggcgaagaacgagtcgtccttgacgctatcgagggccaagccgcggggtgcgcggatagagtcaagccgcgagacgagagctagctgaatcgtaactcgagcttacacgtcggtcgactcggtgtcagtactttgggctagcttttggagatcctggagtttgacaccatcgcctagattagaggagaatgagtgatggtcgtcgtcaggcgatgttgtacatagacgactctcgataatcatggttcgcgtcgcgcggcgcggtgaaacgccaaagggtcgagtgtgacgtgacgtgacgtgacgtgacgtaccttgattgttggtggacgacaacgccttgaggatttgaactggcgtgatcgtagagtctgatgcactcatcttgtgcgaggtatcttgtggtgactattgcatgaagggggatgcgacgaggtgaatggcgggtgtgcatgtctcttctccctctctttatatatagctgggtagtcgggtcccttgacgtctcgtgcatgtgacaacgaccacacacttagcgactaggctaaactgatcatctgacacttgagcggatacaaatatgcagcaagcccagggggagtaaggatgacgaatccacaccgtccagtgttgcagctcttgatacacgtcgccccgccttccttccgcccgcgcgtcatcactgctctccctcgcctcctcttcctcctctgccttgcaccgcactaccgcacccttgacttacctcattccatctccccgaagctctctctaccaccccccaccccccaacctcgctctctcaaccttgatcaacctcgacctttagcccatatcaatccgcagcaacattattagagaccttcctgttcatccgcagcacatctcgatctcggaacagcaacaggtcacatcctgtcaataatcccccatcaagtacatcaccgactgttccccacccaatgcccaacgaaaactctcccttgttgggacgctcccagagcaatggcggtctcgatgacccggcaaagacgtttcgtcccctcaaatcgtcctggtacttgatcaagaacagttggctcaacgttctcctcgtcaccgtacccgtcaccatcgcaggtgagtcgatcgcactcccgcaacgtcgtcatcatttgtgcggatggctagttagagaaacgtgccctgacccagagtttaccttttgctactctcttctggcttacgcacgtatggtcgccctcgaacgcgcatatcttgccggaatccaacagccaagtttgtcaactggcctgccactgtcaagtttgtcatctcgttcttgagcatcattccgctcgctgccgtcagtagcacagcctatcccacccatctccatgcgccgtgattgaccccgttgttcgccctcacagttgctcggagatgctaccgaacaattgagcatgagcttgtcccagagcgtctcggctctcttgaacgccacgttcggaaacgccgtcgagctcttggtcggaatcgtcgctttgcaacaggatcagcttcgattggttcaaacgtccatgttgggaagtatcctttccaacattctcttggtcttgggttgctcctttgccgcgtgggtattcatgagatacacgccgacctcctcgtacactcgactgacctttgcgtctcggtcttttacagcgctggaactgtatacaaagagtcgaccttccgcatgaccgccgcccaaacctcgtccggaatcatgaccctcgcctgtgtcggactcgtcattcccgctgcctgtaagcgctcctcgttcgtcgctcgtcacgtcgacatcgacccgctcatcatatacaacgcttttgcatgcacttgctagaccactcaacctatgcccgttcgccccgtgacggtggcgctcacgcttcccccaaagacttcctcggctctatggccgacaaggacagcggcgctcccgctcccggcgacggaactctcaagggactgcttgccttgagcaggggtacttcgatcatcctactcggggtctacctgttctacctctacttccaggtgcgcttcgtcccgcgatgatattttgctcgaatcctcgactaatggtagatcctgaatcgaccaccagctcaagacccatgcttcgctcttcgaggctgacgctcaggccgcccgtaccaacgaaaacggcgaggtcgaggaggaggaaaaggcagagatggacgcctactcggcgtttgcctggttggccattgtcaccgtcactaccgctgtctgcgccgacgttctagtcgccagtatcgacgagaccgccgcgcaatggcatctacccaaagcgtgagtcggaaggtcattcttccgttatggtggcagtatatctattggatagctgatgcctactctgtcgaccgtgtacagctttatcggattgatcttgttgcccattgttggaaatgctggtgagccgatcaccgcttgctgggatcagagttgctgtttgttctgacacaagttgtctgtactgcctgctcatcagccgaacatgtcacttccgtctggtaagtgaccgtctccgcctcgtacatgggactcagccgactcatcgtctctactccgcttcatgtaggatggccatgaagggaaagatggagattacgatcggtgtcagcgtcggatcctcgatccagatcgccgccggcatgatccccatcttggtattggcggcctggcccttaaagaaggacttgaccctctatttcgccgatttcgaggtgagttgcttagcagcttcgggtatcagtaacgtatactgatgcgcacaacgtcttgaatatctacagaccatcatgctcttcgtatcaggtgagaaatacatacagcgttgcgtcagtggcgggatttcaagctcatacattgtcgctctcaaacagtcatgctcgtcaacatcctcttgcaggacggcaggaccaactacatcgagggtgtcctttgtgcgtcacccttctggcctgtctcagaagcacatccactaatctgacgactgcacgcacacatttccacacgcagtgatcgctctctacctgatcatcgccctggcctactttgtctccgagtgattgtgcgaacctctctgtcctgattttgcctggatttaccgacctaaacacgtaccactgtctcaagacattgtcgtttcgatataccccgaggtcattttgcaaatatttgatggtatatggttcatagcccgacagtcggcgacacacaggcagacgctatgtccgctcattgatagatctcccgtgggctgacacggcattctcgtccgttcgctcggatgtgtttgtggtcctgttcgggtcgaaaatcgtgcagacatgaggcgatgctgcaattcgctgagaaggggtgacgtcgacttaccacgtcccgggtcatgctcttgcgcatatcgaatccgtccacctcgtcaggtccgggatcctttcctaagccttccatgccgttgtaatagctagaggcagcaacgcctcagcattttaacctgccgcatataccgacgcttgctcagactcactcgacgacccttcgataaacgctataccccatcgcctcgtacattgctatcgctcggtgattgttacatcggacgaacagatcaaggaaccaggtgtcccacccctgaggcccagatcttgtctccaagaagtccatgagcttcctcgcgagccccagcgagcgataaggcggagagattgacagggcggtgacgtgaccatgatgctctgggtgcggctcagggggttcgtgtttgccaatgactgtcgagatgccgtcaagatacgaaagatcagctttactgtatactctcattgccttctttcgagattaccataagctgttatccgatcttcctcggcatcggtcacgacgcaagagaaatcgggccatgttgcgcaatattcgagataaaaagatgcccggtactggagaaaatgcaaacacgatgtacagccatcagtccaggacatgctttatcactggatatcgaggaactgaccgtctcggtccaagcgtcaatgttgacgttgttgatacgcagcaggtcagtcgcttgaaacggcctgatgaccgacattttcgctcagatgaatctatatggcgattatttactgggtccagtccacgtagatcggttgctctagatagagctaagaatcagatcctgcaagccgagcgcgaatacttgagtgcctggcatagcagtcgctgctcggacgttgctctaaaattcatgtccaacaggatgtaacaggtcgcaggtcggcgaccagctactcgagatcgagatgacctgacctccactttctgctcatcgcggccggggtgggtcgacctcgactagggtagcactctcgcgatatacctgcttgtagcgattgagttatcccagacaacaacaaccatcgttcgatctcgtcgagaatctactatacgactcgagtatatcagcaaattgacaagaccctcaatctctaggagcgctgtcttgaatccatcgcgatacggatataccttgtggtaccatcgacgaagacatccatgctcgaaacttagtcctcgcaaagtcgcatcctgagctagccgcccccttcagttgaccctccatgccgagcgaaagcatccactaggttccaatcgtcacagcagtacagacgtaatcatgtcggcctcgctcaagaagaagctcaaagggaacgtagcggccgcttcgtcatctagtgcgacgggaagacgtatcgcacctcctctcgcttctggcaaaggctcagcgcctggaacaccacgcgcattgaatgacggctcattcgctgatgagatgcaaatcttccagaccggaatcaaggatgatagcggccgagtgaaggagtttacggtaagattgggtcgaagaagagcagagggggactacgccaaatatctgacctggcagcgttgatttcacttagtcggagaacgacgtatgtccaatttgcaaaacagatcgctattccaagccgtccttgagactgctcatcagtccctgctatcacaaagcgtgcgtacgtattctctcgcacagtgtttggccccatcgctgatgtccgttacgaccgctcgtgctcctctgcttcagctgtgaaacatgcatagatcgactgttctctgtatcggctcagacctgtcccgctcctggttgtacgagggttctccgaaagaccaattttacacatcaaacgttcgaagacctagaggtcgagagagaggtgggaatcaggagaagaatggccagcatgtacgtctgcctgaaattgtgaaccggatcccagccttatcttaacctccttaccctggttctcagtttcaacaagacttcagacgactttgcgaaagactctgaatatgacaactacctggaattagtagaggatctcagtgggtcataaatatatacctggagccggcttgaagcaaatactgacgcaaagcgcttcgacagctgcccatctgatcaacagtaccgaattagcagagacagagcgtcgaatcatcgactaccaagagcaaaacgccgactttatcgcgaaaaaagccgcacgacaagcttctgaccgaacttcggcgatggctagagaggaagccgccaggaaagaaagacaattagcggcgaaacaagcgcaagaggaggaagaagtactgcttcgccgcatggagaccctcaaacaacaagccttcgagagtatagcccgcggcgagaccggttcagagttctacaaggaaatggaaaagctcagagcaggagcagaggaacagagcgctgcgaatcaccggcttcggaaaaaggccgcccgtagtgggatccaggctgacacgactcaacatgctcctacgtcgccgtcttataccggtcctttcgttcctttgccattctcgtatcttccttctcaagccgagcgccatcagcgaccagacttgtcggcaatacccacattgcatgagatgggtacggtgacggcggagggggtcgaaaccccccgctacagagatatcgactatatagatagacagctcaaagcgcacgagaccttgtctcgtatccgtgcgggtggtttcgatattcgagaggtctgggaaagggacctacggtcaggtctggagggtctgttggtaccgcttgtatcatgatcacgaaccgtaatctatactacattgaaaagcttgcccttataattccctagtgttttccttcgatagtaataatggtctggtaccacgagaatagttcccgaaatctagccagcaggaatcagagcggtttgacattaggctgcacaccatgggccgtaccaaggccgtcatcttctcgtgttgatggcccttgcgaaaacatcctcatatgtttcagcctcaagatcttccttgtgaccgctttctgcttaacaccgtatccgtgtcaaacatgtcatgcgatcagtcagccgttgatgtcttcctgctagacattcctgtctctgtgcggcttgctggacgtctctgactggatcatgatctctttaatactattggcattttggccaatattcacagagaaggaagtacgtatgtatcaatctcgacaaatctcttgctgacgcacagatatatgtcgtaattgtacagatcacacctcaaatggctatcaacacagctgcaataactgggcaatgactgtctatcctaggtctgaggcccggcagctcgaactgcaaacgcttgctgacgttcgactggcatgacatcacaattttcaattgaggtcgtgacttggtcaccttgcagactacatttgttttggaacaaggccttgccgccagccaaggttccgctttgacaaaagttaagagaggaatcactttgcgagggaaaatgcagagacactatcacgttgtgcatcaatcgagatgtctcagccagccacttacgcctaagcggacccagtgaagcactcagttttcctccatcacgcacaaacacagtcatagtcttcctttttgcggactcatcccctccaacatgtcctcaaacttggcctctctgtgccaatgcttattgctgtattgaatgtaattcttgttactcagaggcaaagcaaccgccgtcaagactctgttctgccaagggctgtggaaactggtggaaacccatggctgaggccggtccaaagctccttcaatttgccatcaagacggctgtaatcaggacccatgccctttccccttctggatcgctcccttccaggaatcttgcccccatagcatgctggggctaataacaccattcacagggatagatttggcagatgtgcttgagtctttgacccagcaaagactcattgcttcatgatcaggaaatttatacaacaccctccagtcagagcgattcatgctgtaacttgacgcagacacagtcaggctgttgtgtgcgggtacctgtaccgcagaagtccttgtctatgctcagaaactgtgttgattgaaggtcattatgcttgcgcttgtgacaaacaagggcaggcttggtgataaggctactgaagacttccgactcggtttgaggatttctctttcagttcctatggtgtgacgctatgactggtatgtcctatgcgattatgactggtatgtcctatgcgattatgactggtatgtcctatgcgattatgactggtatgtcctatgcgattgttgatgaacatgtctacggatctgagtattggtgtcaaacggcccaatgatttcgccaagacgtttgttgacgagattgtctactggtcaggtgcagaggaagggttgaacctggaatgcttgaacaatgtcctcgatgatgaaacactgtttgaaaccaaatgagattgattttaggccttgtaaagtactgatcgcgcgccaaagtccgcgggcgtgaagcaaaaaggatgggcagttgaggagggtttgggcacttcaatgatgtgtagaacacacaatatacatcagaacaatgtcaaatcgtggaattgggtagctaagaggtagtacaaacgtttcaagaacctggtcatcttgcctatagcctttcaaacttcctcaattgccagcctgcaatcataataaggagccccatcttctaccaccattatgtcctcccacctggttgtcctgagctgcgcggcctgtttcagtgtcccattgaggacaagcctgacaactgtcccccattcatccctttgcatttttctacagttcactttgtgggatgctgggttgcaccaggttccacttcttgttatgagctatggcaccccaaactacaagactcttcccagatgacctgaaggtttgttgtaggtgctggggcaggtactcctttcctactttcctgatagtccacctagtggtgatgtccaatctcatcccaattgtgtttccatcagtgaagatgacgtgcctccagtcctgttctatgttgtctttgacccactgggaactcttggcaatagccttgggcgttaagaagggctcctgttgcttgtgtctctcgtaaaagccgaaagagttggcagcctttctgacagtgtcatcagcaacattgctcccaggctggccagtattggctgagatctctggcaagttgcctatagtccctagtatccatattaactggtctgccgcttctgagaaggctggcttgagaaaagtgcaaggtttccctcttcaaggtcctgtgtatagcacctttgctgactcctcgtcttagcatcagccctttggctgaggtctcattcaacttatcgtccagggcaataggtcgtatctgcggatacttactgcaatatattgcaatggaagtcacctcagactgttcccaggtgatgtcacgtgatggactccaagaatgatcccccggagaggtcctcgtaccaggtacatagaacactagagaggcatattctatagtgtagaacgttgtgatagagttagtactgcatccattatacaatcctaggtaggagaccaacggtgcaagtcctgcgtggagtaacaaggagtcagttggggtctaaccctaacaagtttgccttggaggttgattggttgacactgttgacatgatagagtgacaaggtctaagtgaggaatagggatgtggtacaaaatttgtcagcagatgtcagaatgaagcaacacatgataatggttagcaaagtaggaactaaagcctattagagggtcttgtctcctatctcaaaagtaaaaaaggtgattagggtcagatgatgtgattagttggctagcaaagggagcaagtcgaactttggaaaggtaatgaaggggttggtatcatgaactgaatagatgtgaattgtgtcgcaagtggaagcaagcgatctagcaattggcataaaaggcggagcaaagatagtccaagagatgactggatcacgacacagaaagctaaatcttttacaaagcatcacaagccactatattagactaagtataggggttccctccggtgttctatgtgtctagtttgaagaatctctcctacaacctttcccatttacacctgtcacaacatggtcccatctaatggctttaggcaccagacgtgacgggaaccaccatattgatggaatcactaagcttgagcctagtcaccttgccatgatgaaagcgctttccaaccaaagcgtcaaggaaagcaagcgaatcggcaaagactcaaagtgccacagcgccaagatcacctaacccgagaccaaaaatctatgtgcatcgagacaggtcaaacgacttgagctcttctttagaatagccaaggatactgtgtaagctgttacgacggagcttcgctaagtcgcgtctaatgagtatctaagtgtcaacgtcggtacggatcctaggtagtcacaacaggagtgaagccgagttcagttaatggaagcgaattcggttgggacgatacgaatccgggttgatgtatggataaggaagtaatgttgctagaggtggctaggatcaaaggcttgttcagtacgaacggtgagacgtctactacttagcgagtgtcctgggttgtaacctcttcacaatacgtcttgaagatgcggtgctgttgcaaatcagtaggcttaaatagaatgcgatattggaacttgaccttcctagtacaagaacgtcgtctgccggatttggtcaagttctactaagtatatatacgaaaccgagagtactcgtagcgggtcgagaacaataggtggtccaagaacggtgaagcgaattcggaacaaagagaaccgaattgagggtcgagagttggtcatctaacaaagatgaatcgttgtctgctgagtcgagatgtctttgttcggtgtattcggttgtcaaactatgaggtctttgttcgatatccgtcgatgccgctattgttctccgctggtggtgatatcgaatatgcgttgtgtcgacggtagtggtaacaatagcagagaggtgacgagaacaggtgaagagaacgcgcgagccaaagctgtaagtgcaccagccggatgcgcgtcgcttcccgtaacataagctcaggacaagcttgtggctggcttgtgtcggagctgggtgctcatcgataccatgcagctctgtatggcaagaaaggcagagtagcaacaggctaagctcactgctgctcaggtttgttaagcttggatgatgttagacccgattacgcgctcaggcaagctccaaacgctttttttgcaatagtgcatgtgacccaggggatgtgcttcgtaggggcatactagtaatctcccttggtttcctgcccaaggctgtcattggacttcaagataggaggtatgtgcttgtcctgtctcatgatatgtctgctgttaggcttagaccccaactaactccttgttactccatgcaggacttgcaccgtaggtctcctacctaggatcgtatattggatgcagcactagttctactacaacagtctacactatgggatatgcctctctagtgttttatgtgtctggtatgaggacctctccaggggagcgtcctcagagtctgtcacatgaaacaccgggagagtactccaaggtgaaatatgccgtgagataccgtggttagtatccctggctacgacctactgacctgaacggtaacatctaccttctgctggcaacttgtcagtccgttggcaattgctgatgcgcttctccttgttcatctcgggattattgttaacggaatttctgtgttccatgttgagacatatgacatgcccactacgttcagtatgaagtccacagtgttttctacaatcaagcaattgaggactcagactactattgtctcaagatatcatgtaccaaatgagcttgacacctatcaaacggtatcgacacctgttgaacgatatcgacatgtgccaagcaacattatcgcacaatcgaggatatgtttggcagccatccatgctttctcttaggcttctagcaccccagatgggactcgtgaggggagtgtcagtttaactgagtttgtttacggatgaagtaattacgacaaatagacagatacacccatcgggaccggagaacgtttgaggtcggacattactcgctcggcaaggggcgtcttacaacgtcggacagcaagcgtcggtctttacaaaaaaaaaaccattacatgcaagaacttggaggagatctggtgatagcaaaccccgttcagggccaggatgatgggcaacgcagcgaggacgagggacaagccggccaggctgatgggctagctcgattcttgacgactccattgactcaaaacattgagcaagatcagtccaataatttctgtctcaattaaaccattgagtatgtcgtatactggtcagccaactatcccctttcaagtaattacacctagatgttgattctattcaagctacaaaattgactgcagagctgatgcaaagatctggggaccgcttcaattgcatcaatgctgatctcatgggctgtggttcggaatatacaatctactccaaattcgccccctaggagaggtccccaaggctactgttatttgtatccaaacggtatatcctagagccacacaccacagatgactatatcattatctgtcacgaacaaaaagtaatttggccccccaatcatatacgaatcaggccaattttcacagcttgtgtagtccagtccagtcatgactttctttttaggacgaaatatcgtacattactcaagatacagatcagcttgaatcctggcattgatgagcgccagttgtttgatacatatagcagcaatgtgcgataatgttcagctaagtctggcggactctgtttatgatggaaaagtcttgcagaagctattggaccaaacacaccccatattatgctagagaggaacatcccaaacacccagattgaagtagcacactagtgttgcactcattatacgacttcaggtaggaagcctaaggagccagtcctgcatagagcgcagaggaattagctaaggcctaatctcagcagtctgcagctccccattcaagatcactaaaatgttgcctgcaccatgtgtctcgacaccgatggccaatcccctctctaccagctaggaaccaaagaagtcagtcatcaaggtccttccgaaggatcttacatgaaaaggttgaaccattcactgcgctcagtaaggttttgtaacaaacctctgccccaagccaaatgttgttgaagagctctgctgtcaaggccttgagactgtcaaaacaatattttgccgggctgcaaaggaaacaaaaaaactggcggtgacaagacaagtctgttgcaaacaggcatgccatgattggctcatggatgcaggaagcaatctcaaccacaaagcctcattctgtagaacgtacaatctacattttacgttgtacaatctacaggattcactgtaaaatgaacaggtttcaaggggttgtggagccatgcaggctacatcagaatagtatacataggagaccatttgggtctcatttcatttccccctctcatgtactacttcactgtataagtcagcaggacgggagcaaagctaaaagccttcgtgtataagcaacggcatagagagagagagaggaaggggtatgcatgcagcaccagttgtgagccaaacaacaccatttccacagctttcactatataccatgctatacgtttcatcaccatgcctcttcagcaattcaaaccccataaactcccccaagcacctcaccaccccctcctccgtcccctcctccgacaacagtcggtctggcctacatcaaggacggtggtacacctgacaggtcgaaaacccggtctaggcaatccagcaaccgcaaaagagtaagtcctgctcttccattttttactcgcatctactggtccctgtagctatgacgaccgtctgaggagattgaaaaagaatcaagaggcagttgacccagagaaaagcgaaggagaagagcagcagcagcgatgacaacaccaggggatccatcttaggggccaacccattctttagataacaaaatggcggcctagacccgttgaacatccccattgtcaatgaaactattgtcaacaacaaaaaaccctaaataaagaagaagaaaaggtggagcggcttccggcacgtccctaaggggaaacggaaacccaccaaaaaccctatgtcaacgtcatcgcaacagtctaggaataatgtgttgaagattggcatgctatgacatcataggtgatgctcagggtgcaatctcaagcacaaagggtcaacatgtgactataatcacatgttgtgactggagtcacgcttatgaaactggagtcacacattagtgactcatttgcgactcatttgcaactggagttgcacttatgcgtctgagtcgcaaattcgcaacaagcctagttgcaagtacatttgcaggacactaggaggacatgctcatcagaatagtatatataggagaccatctggaccgcatttcctttccctctaccatgtactactttacttttatgcaagcaccattgattccccttcacaacaaggcaagatcagcactagcaatagaccattgctattgcctagacccagcaagtaaccaatctttgtggatctagttgttacttcacaacataatggtggtttccttgactcccggaagcgccttgcaccagtaatagacaagctgagaagcaacagcctccaccataatcggtgttgagtcaggctgacgcttttatagggtacaccaagtctgaattgttgaggagtctgactctggctacaacgctgagccagaaagtgatcacggcgagttattgcacgtccttaagacctctcaagatgaccaccacagcaggtaccccaacccaacaacattaacgaaggtgtacaatcttggcaatacattgtgatttcggaaagacaatttttgtgattgtcatgaaggcacttccagcaagacatcgggagcgccaagcagcaacgtgaagcatttgtagggttccaactgaaacaacattgaaaactgatgccgctgtagaggaatctttccctgccccaagatgccagagtcatctgtgcgacatagtccaatcgaagcttatcaaacagagtcaggtccagcctaccccttggtgactcatgtcaaagcattatatggaacacttcaggggcatcatcagcatgcacagcctggtgtaatatggcattagtatcaattgaaacaatcttaccatgtgtttcctaatgtcgtatcacttcaggcgtcagcagcaacaatgaacaatagatgccaaaatcactacaatggctgtacaggtgcgacttcaatttaagtacactatcatgtagcagatctgcaaagcaagagaggctcagacaacattgtatggaggataaaatttaggtatggtgagccagtagattatacatacacgagacagaaacataccagatgttgtgaaaacattcacaaattctgcaaagcacaggtattacatttgaccttttcctgttcacattcgaagacctgctaggagattataaaaaatcacctgcaaagccatcacatatgtgacgattctgtgctcactcattagcatgcacaggagtacgttacatgagctcaaggtcaataagcctcaaagctccatcttcttagaaactatgctaatcggcagacagtgggatctctgagtctgctcgtaatacctgaccgtttgatttcaataatagtaacggcatgtcgcaggtagattctagtgaaaaaatcatgaaccaagagtaaaggttgttatgtaataccactcaaatgcttaaggttcgattccttttcatattgagctgccagtagcacaagatctttcccacaaggtgcaagggcatcaagcggagatgagtgcgtctatgatagctatcttgcatatttgcgtagaacaatcctcaacaacgctgataggacacccttttagaccaccttcccagagtcctactgcaatagatatcacacttttatgctttctatcagggtctgtcacaggactatcaacattgggcccgacgcaagtctcgcatttggccaaaaatcgtcgagaagcccgatagccgttacgtacgtgtcgctttgagagtcggactttacggtacaggaaagtacaagtccgtacgcgcagtgaggaaaaggactttgaggcggacaagagagaagtaagtagacgggtaagaagcgaacgggtagaagcgcaggattaggggattagagtccgtttccgtacgcttcggcgcaagtatttagccttctgtaacgtagtgtacctgttatgagacgcttgagtactcaacaggactcaagcgtcgatattagatttcttcgatacttgataatcacagaagagtaaaggtcactatcctgatggctaggcactctcacaaacgattctgcacgataaagtaccctatcgcgccatgcttcacccttcatttgcgccgctagccctcccgtgacagggtcttaatacatttcattgtatagatatccaaactcatcacatcttgaaaacgtcctgctgttgagtattcccaaaggatttgttgggggccttaggggctttgtttctgtgatggatccttggactcagggtgcttcctggaactcccatctctttattttagaccatctccttttttagaccatggcagtaggtggctaaagaagtgatgtccctgactacaatacgttatatgttgcagcggagaaggtgtcatatatgctacagtgtccaggtctgtaataggggacttgaaagtgatgaaggtttctcacgaggcaattcagatctagcgctgagacctgggctccctgtcaaaatagacatgtccggatagttagttaactccagagatcaaggacctccagacccctttgatctcctgatgtgacgatgcaagtatatccatatctcagctgtctgtacttttgagacctctaggagatgaatgtcagcatgatagacaacgtcatgtatcaagatccagctggaacgagctcaatcaagcactcagagatgactaatgtgagtgctaggttacgctgttcccgccgtctcctaattcagccattccatcaaggacgccgagaccgcataacttgatatccctatcaggatatctcgaataattttcctcaacaggacgtcgggtctgggacctagcaatgtctctctggtctctgaatataaatttcctacggggaatcccggatgggggtggggggaaaggggggtagcggcgaccgaccaggggcgactgacgacaatgagccagggccgaagaggtttcgagagggagagctgcagccgtggtcgaggatgggctacggtgctcggggcagtggcacttgatgccaggatccgtattggacatacccaggtgcatcgccaaaccaactcctcagttagatccatgtccgctggaggggtcagtctcgccgctttggccgcgactacaactgagcggagaacgcgcttaggccggtttcggtaacccagaagccgactggttacgactatctgctggtggtttccgatttgatctgggacttgttttgatgctttccagctcgcacagcctctacgtgcggtgtcatagactctttgcgacctcgctacttgctacttgctgcatgtcctctgctacttgcctcctgctacactagtactacttgtctctctccatggcatgcaagccgacttcagccaggtgaaactccagctaaataagcgagcgcggggcggagctgaccggtacgcgtcgcctggttcatcgagatgttgaaatttcgagccgatatgatcgatgcgaagtcacagattttgccaatcgtctaggtaaaagataggccaccatctcgcttgttctccaactgttcatcttatagaatctctatcattcgttgacgagtcattcgtaatcgctatgcctcgatcgacccgctcgggcgccccattctcctctgcgaaacactcgaaatccacatcgaagactccagtcaagcagactcgagctcggccgggagatggcaaagccagtagcctgcggactactaaagatggggacaacactactcaattggacaagggggaacttcggccaaggaaaaggactgtccaaaacgagcaggatttggacggtctcaacgtctacgactacattccagcacctgtgaagaactcgcgaactgccaattctcgattcgagctctcgcgagaagaagcacaactagctggcaacaagcgaaggtcaggtgtgaaactagacgacgattctgacaatggtggtagcgacgaagatgatgatatggctggacggatccgtcgagcggcgctgactatagccggagaggatcccctcgaactggatgatgacgatgacgaggagattgacagtgacgatgcctggaactcaggcagcgacgaggaacgatggggcaacagttttgccagctggaagaacggtgaccggaaagacacagcacgaccgcttgcagcgaaggtgaataggagacccttctccaggtctgcttaaaagcaaaactgatttttgtcaatgcttagacggattcgcctgagcaactggatgtcgacatgaatgagacttccgacgacgacgtctcgccagcgtacggaacgtcaggttggtcacaggtctcgttctgcaaccttcaacagcagtctggctgacacgaccccgctccatcacttagctttcgacaaggaggatgatagtgaaagcgacgacatggcttctgaaccagaattgccttctgatctggacaccgagagcgatgatgaggccgcagccgaagagccgaaatccaaagacctggccgatttcgtctcgagcctggcgacaacaaaacgcaaggctgaccagacggatgaaaacgactcgacggtccctgcgtttgcttcggctaacgagctcactgcaaagcgacgccgtgttctgccaagccaacagggtcctgggggcagggaggacgccggagagttcggagtagggtcaggtaatcaaataactttgctatccatctccgctcgaccgttggcgcttaatattcctctacttttgtagcatccaaactctcgctcatgtctcttattggctccgatccatcgctcaagtcgactatcgagggtcttcttccgaaatccgacgtcaaggagggaacctcgactttgaagaacggcacactttctgcccccttacctactgttgtgctggatcgtctggcaagggaggctgcctatgagcaaactacagaagaaggcgccaagtggggcgccgttatgaagaggatcaaagaagcagatcagcttaggttccctttgcaagtcggcggtactgccggccaaggctcgtctaaagacaggcagcggggcggagtgaaaagcggcggagatttgatgggagacttccaagtatgtcccggacgaatattcaccgatatgaccggcgtgctgacctacagacaccatgccaggcaaccaatgcattggaatcagcagttaccaagctcctcgagtccgccaatctgaaggataatcagattgcccaggccgaaaaggatgctttggaaggtcaagacatcagtgtcgaagagattgccgcacgccgagccgaacttcgccggcagcgggagcttctctttcgggaagagagtcgccgcaaacggatcgccaagatcaaatcgaagacctatcgaaaattggctcgtaagagagcggacaaggcggaaggcgagattgatctggatgacttgcgtgccctcgaccccagaaaagcagaggaagaacaggaaaagatggaaactgctagagcccgggaaagggcaacgctgaaacacagcgccaagggaggacggtgggcgcaaggccagcatggagccggagagatcgaaggcaaacggcaggaactggagcacatgctggctcaaggggaaagactaagacgcaaggtgcaaggaaacacatcggatggctcggacagtgacagcggtagtgaagaagagcgaggcgatgaagaggatgttaggacgcgagctttcgacgagctcgccagtcttcgcgacaagcaggcagcgctcgaggatgcggtaacaacctcgaagcccaacggcatctttgccatgaaattcatgcaggatgccgcacgtcgagaaaaggtctctgtagatgaggaggagagagagctgcggaaacaactcgagaattataacgacgccggaattgaaagcggaagcgaaagcgagaattctgacactgccaacgtggcccgtgtcggtggtcgtctcgtcttgagcggtacagggatggccagccaggtgagccccgcaaatgtaccggcgatttgcatgacgcggttatattgattttagtgaccgtaaccctcccagcctgaatcagcgcagcatgtgcagactgcatcatcagccaagcctacaaagcaatccgttgctggacctgggcctgcccgcgactccgctgcgtcgacaacaacggcaatcgagaacccctgggctgatgtttcagggcaagctagctcgagtcttacgagaaagaagaacaccgtcgtgatcagcaagagcacgtctgtcaaagataaagctctcgacgccttgaacaagcgcaagtcgagcaaatccgttgatggcaagcaacgtaccatcgacgacgctgtggtggacattgagactagcaacctgggagctggctctaccaggccaaatctgccattggacaacgacagcgaggcggaggaggtcgatccagagcaagcgtcgacccagcgaggtccacgagctttcgatcagcgggaccttgtcgcccaagctttcgctggggacaatgtcattgaggtcagtccggagcgctcctaagctgagtttggccttctgctgatcactcacgctgtcttcccgtaccataggaattcgcctcggaaaagaaacgtgcaatagaaatggatgcgccaaaggaacaggacatgacgcttgctggttggggctcctggggtggcaaaggcgtcaagaagaacaagaacgcgcgcaaattcgtcaagaaaattgcaggagtcgacgcggccgagcgcaaagacgccggcaagaagaacgtcattatcagcgaaaagaaggccaaagcagagaaatacctgtcgacatcactgccgttcccttacacgtcccagagtcaatacgagcaagccttgtcatccaacaccattactcctgaaacgagtacggtcggaagtctccaacgcgcaatcacgccccgtatcatcaagaaacctggtgctatcttggctccactcaaaaagctgcataccgccacgtcgtagatgtatgtgctccgtcgcctgagtgtatcatttgtatatcctataagtcagcaggtgtacaataatgtatgcgaaaggttcccagcaagcggattagggactgtgaaatggatcaatccatgttgtctgcgtcttgtccgatcactgccgcttgatgttggactaccgtcagctgatggacgcgttatccggccgtacaatctatttgcatcatcatagcttgggcctgtgtttatgaaacatgaccgtccctcagtcagcgccctcgttttgcaaaacgcgtaatcaacgggtctccctaccacaactgtgcccattgcaaggcctccatttgagctcgcaactcctttgcgccaacttctttcacgctcggttgccaaccagtgattgtcctcaatttctgtccgttcaggttaatggccttcttgcggaaggagtcttccgtcaggaagggcgagattgccgaatcgacaatgactggtctagaatgcgacatcatgtcttgccagactgcaaacagtagtgtaagcttgcgctgcgaccccccgatgatccgatgacgcgacccaccttccatatgctgaaacgtacgcgcacgtagagaattcagcggaggccgacttcgtctcgatgatatcagttcttgctgcactcacatcctcgttgatgtcatccaccaaatgcgtaaagtcggtgcgattgaacgacgaaacaagggacgagatcatcgcgttgtgaaaaccgtacctcacttgaaagacttggctgcatgctgccgcaagtttttcctgatcggcagacagggttcagtaactttgccgccttacgcccacatctacgtacctgggtggtatcattatcatccacctacaaccgattgaacggtttgcaagattctgagccgtttgcatcttttcgctagaggctggaacgctctactcactaagttgaagtatggtgctctgatcctggccgcaggttccgacagatcggcgacttgcttcatcccttgcctttcctgatcgccgtctttgccagtcgaccacgtccatgcagacggcagctcctctcccgctatattgtccgcttcctcccttcccactttcgccatccattctgccaccttgatcaatgctcttggtacatctcgaacgtgaacggtatgcaaccgtagatcagggttgtggagaaatttcatctcctcgttgtttttgaatttgtatatatgtgctgcacgggaacgccgagtgagcgttgactctgagatgagaggacgctatgttacgcaccgatgaccaatctagctaggacctgaccttccatgtatgcctccccgtatatttccgcagcacggacgactgcatacctcaaattgggcacaacggcttgagcccgaaccgattcgtgccaccacctgcctcgtacgtcgtctggttttgggcctaaaccgtccgatcctttttccttggacctgaacagccctccctttttctcttttttcgctttatctgacagctcagcgaaccgttcattgtagccaccagcgatgttgttgctttgaatgtagtacgggcccaccagacgaatgtaggcttgatgtgggagttttgcagcatgccgagctagcgcaagaggcaaagtataactttgttggatatgtatctatgcatcatcatcggaagtcaataccgaccattgccccctttgaaaatgcaatacgggacttactatttctggtctatcagctcgggtttcgcctgaaagcagttgaagttccgtgtctcgtcggcgcttatgctatatgtttgcgactgtgtaccgccactactcaccggtcaagtcaaagatataatcgaaagacgtgatgcctttcggaggcgtgaagatttcggcaactctactggcgaccgacaaattcgtctgccgatactcgacgaagtccttctctaagcatctccggaaagcacgatctaagtatctgttgaaggaatgagtttgctggatgagacctgccggaatcatacgggattccggaggattctactcacgtcgttgctggttgcacgctgaaccggtctgcgatccgtaggtatttgacaagaggatccgggttgccattcgagctgtttggcacttctccctcatctccacaaaggtaagcaacgagatgtcttccaaccgtagacacccctccaaggatcaaggctgtgggtctactgtcgtccgacatgcctaaggggagtcgcctgattggtattggtggaaaggaagttgcgggaaacgggatatcaagagccttgcaagacgttcttgctccttgctgaactttttttgtttgtgacttttcaagaatgtggatcgatgacggatgcgtttcgcgaaagtgggcaactggaattatactcctaactcaaggcatagatctttatatctttataacttgttcccgcaaacgaaggaggaggttaaaatagatatcttgatgtaggattgatgtgatcacgtcgccatttggcttgtgctccttcgttcgccacggcgagttgtccagatgaattgatcagattgattaagttgtctcaggagattgaaaccgccgtgagatccgtccgactgatgatgaccagccagtttcgaacggtattcccgagctccaaagacaatggcgatcgaccgagctctttcgagatatgcggctctgccaaaacattattattattactgcgatttcatggccaggttctctggtcaagaaaggctcttttgctgagcgatctagtacgaagcgacgagttgttgatgagccatgagctacgaaccgggattcgtcttttgttctcgatccggtcagatccgagcgattcaacgacggttcgccgagtctaggtcacgtgacgagcgcatcccttatgtttcagcatgcgaaacgattgtcagacatctgaccgtcagcttgtcaggatgtgttgggtatcaggtatttgaccgttgacgagcatgagaagcattggtgtctcgcttaaccgatcagcagatcatttcatcagcatttacctgtgtcggaccccatgcggaagtgccaggtggcgtcgcatcccggttgcgtctccgggatgtgtacattattagctaggaacacatcactgtcgttgcagctagggcgttctgatcaagtgaccactggttcttccttcaatatactctggtggagttctagtgaagacagctatggctattctgtatctgtaaaccagggccttgacaagggcaagatatcagaccggcgaccacctccctcctttgacaagttgccccacgctctccctgagaagtttcagactgagagcctcttcgtgtacagttgatactaaaggtcggctaacaattcgaaaatctcataaacttgcaattgcttagttctcgctacccacaccgggagtcgaatcgcaagcaaaatgctggaccgtcaatctcaataccagactcttcgatctccgttgtctccgctcagcgataaacagattgacatgtcgcgcgaaggtacgcaaaacatatcgcatgcttcgttattccagtgatgtgaccaagagtaacggaatcgagttcgcagatttcagtgttggaccgcccagctatgatcaagcacaagcgatggatcccatcgatcctgaaaatggttgtgacagggaggaagaaatcatgtgtctcttcgtacggggctgggcaagtggtatgcagagagaagcaggtatgttccgagagcatcacgccgaacgagtttctaccgtcatcgcatctcgacccactgcccactaattgttatccttcggcagaggttaatctgatcaaagcggaggcgttgctgaccgaaatctttccaaacatcaataatctgaaccgcttacaacaaagggacgatcaagacagttcgaaggacgatcaagacaagcaaagtatattcagtcgtttgagtcgatcgtccaagatgtcacgcaaggtttccacatcttgttctagacaacgcttgaggatgttgatagcggcggacaagatcagtatatccagtttccttggtcaagctcggggcgccgtcaaacaccaaaaggggtatatcagtcgggcatcgcggagcgcttttacaccccaggaagccgagaaatggttgagtgacgctatcgcaaccgggcccgatccttacgctttgcagtacattggagcaaggcaagttcgatacctgtcagaaccgaaaaagaagggttacaccctactgtgccagaccaaagcttacaagaacacgatgcgggcccaagaagcgcgtcttttgaggatcgagaaaacgatgcagaccctcaagtagcttcagtgtatcttacggcactagggtcgagaatgatttgcccatgatcacttatcgtcagaccgtctatctcttcgagcgtctgaagtttaaacgagatgtgttacgaaaaagcctgctacccccttacttcaaagcgacttgaccatttccacagattacgaacaggcgaggtgggcagacccctcttcgagtcagtgttgggcgaacgccatcacgccgtgcgaatagccttccgggacttgaacagtccccgtgcgcgtgcgtggatgatataatacacgagcctggaggctcggatgaagtagaaaaaaagtcaaaagaagaccgtaacaacacaacattgtagcctgaacctgtccctcgcacccgatccgtctctactggtgtcggacgtatgtctgtgaagggccattgattgagtggtcagttcgagctcgagataaaagcattcgtgacgaatactactcactccgatgagaatgcctgaaaaggtcatgaacagggccgacaacggaaaaggagtcagtcctgatcatcatgtcagcaataacgctcgagaaccgacgtacagtgatcacgctcgtaaggttccagggtaagctgctcccttggcttgaccatctctccctggagcttctttacttcctgagcaaagacggcctcggccggtgcggtcgagtcgatacagctggccttgatggagatgacgacgtgtccctcgtgcttcaagaagtggtgggcgttcaaaccgacgatacgagcctgatcaggctgggcaactatggaaaaaaaggcagggtgtcagagctgctcgccagacaaagcgacctgagatactaaccatcggcaaagacgacgtcgaccatgctgacgagcatcctgtacttggtagggtgacgggcgtcctcgacgatggggataatgttggtcctcttcttggccatgttgacgagatcacgaccacttcggtgagagaactcgacggcgtagacggttccctcgggtccgacaatgtcggcgacgtgggataccgaggtaccgctgaggtgatgcaaggcaaaggatgggttgtgcatcagcctcgcgaaggtggttttatgtttgagcggacttgaacgtccgacttacgaggcggctccgaggtagagcaccttggcaccgggcttgatgtggatgttgtcaagacctcccaaaataccagcagcaagcttgcttcggaaagggttccaaacacggaactcggtcttgtcctcgctaccgtctatcgcgagtggtgatgaaaaagaaagatcagcaagctgaagccgcgagcgtttatacacgacctgactcaccggcgttgggggtagcgatggtgatcctcttctcaccgtagacgctttcaccgggaacgaggttcttggtgacgagcaagtgctccttgcccttggcgataaagacaccgtcgtgcttgtggggctcgagggtgaccgaagcacctcccttcttgccaacacctcctcgaccagcagcaccacctcggcctatggatcgtagacgatgcgaggtcagtccgtgttcaaggcagtccgatatacgcattggctaccgtagctcacctcgtgcaccaccgggagcacccctgcctcgaggagcaccacggccaccaccacgaccgccacctcggtcactgaaaccgccacggccaccgcctcggtcgctgaaaccacctcgaccacctccacggccaccgaatccaccgggggcaccacctcgaccaccgccaaagccgcctcctattcgtgagttggaagagatggtcgtcgtcagtatcgtcgatcgtgagcagacgagagcgtccgactgtgtcgactgacctcgtcctcccctagcacctcctcgtccaccaccacctcggccgcctcggtcgaaagccattttagtctatgttcttttttgcgtttgtgtggaaagttttaaaaggttgataggtcgtgtggatgtaccgcgacctgttttgtatttctgtgggacagtgaaaaagtccttcagggtgggatgataattcgagtgttccaaagagatttttattctgtgtgagcgaatgtgaggtggtatgattacgagtcgaagaggatatcttcgaggtgaagggattggcaaggaggaggagagtgcaaggtaggaaagagtgctagagtgaggaggagtgaggagcgagaggaaccaggccaggcaggagcgcagggcaggcaggtgggagagagagagaggggagggtcacgggtacgaaaatcagaaaattcaaagattcaagttgaaaaaggtggaaataagcaggattagaagattagacgagcagcaggagagtagttttacctacctcccgggtcgcgacatgagaggaatgtatgtacccgcggtgcagctcattaggtcgatagactagactagagaatgggtgtacgtacattcgccttgcaactaatcgtcactgggactggctgcaccaccaccaccgcacacgactcgactcgactcgactcgttccatccgattcacactccctgactcttgactctcaaacgcaaacaccgccaatcatcacatcctcctcctcctcctcatcatcatctagaccagaccagacgacaacctcgttctctcctcttcaaggtccagttctcggacccggccacactcccttgtccgtcagctcagcgtcgtcgagccgatccaatccgctcatcccgcgtcatcctgtacgcaaaggagcgagtccatcgacacttttgcatcgagcaatcgacctcgtgcacgagtgctagaatcgccaacctgttacgcctcttcacacgacctctttgatcacgatctcgaggtgaaccggcagacacgaaaataaaactagatgaatggtcatgccggctcggccgtccctgctcaggcaggtccatcaaagttgaagtcgggcgggaacatcaacggcaacagtgttgtcaacggtagctctgcaggcaacggatccatgaacagcaacgaatcggcaccttcaccgccgccttcgcacgcttcgaccgtggtgagtcggaccgtcggtcgatcgatcgatcagtatccgaattcagccaaactgatttcggaatcccccctcccgctccttcagcatgtgtcggtaggaaacgggactagccacacaggcccattgtcgggagcttcaccatactttcaacccgccgccgtcaacatgaactacaattcgccccagtctgcgcagatgatgggtggatacgcatactaccatccgcaacagcagcagcaacaacaacagcaccaagcctacgcagggtatcctcccgcgggcggcagctacgcaatgaggacgcctccgaacggatcctccaacggcgtcaacggtaacgctggatactctcgtcaaaataactatcatcagcagcagcagcaacaacagcaacaacagggtcattttcaccagcaacagcaccagcacatgccttcgtacgactataatgcacacatgcaccactcggctggcaacgcggccggcccttcacggtatcaaggttactcgccatataatccctactatcctcaaccggtctacgcccagcagggacccgcgatgcaggcttccccttacccagtctatcaaccctcaggcggtgcttacccaggagctcagccgatgtattacgacccgtcgatgtattaccaaccaccaacatcatcaggtcgaccgccttacaactacatgcaccaaggtgccaacggaccgtatccttacgccatgccgacatccgacatgtcacaccccatgtcgacgcccttgcaaccccagaccccatcttcctcgcatgtgtcgccctatcccacatctcaactcccgcaggccaccatttcgaaccccccgctccctcctcctcgggaaagcgatcaacctccgcaaccgcccccgcctatattgtcagacgagactttgacgtcggaaagcaaatcgaaggcagaaggtagcgattcgatgccagtgtttgcttcagtcatgcggtcagcggtgaccatcaaaagggatgagacagtggtgccttcaccaaagcaggaaaagaaggaggagggcaagaaggaagagcagaaggtggagacgcctcaagcggacgcgagcagggattcccaaagcaagggggagagcgttgatgcggggtctggcggagctcgaatggaagaatcaacagcgacatcgccggaatccccgagagatcctagcgttccagctcgaaacgagtcggacaagactaccgtacccgaaaaggaggtggatgtcattgaggatggattccaggtcgatgccgaccagacataccgtaagcgccattaagccattacaactcgcggtgagatatagctgatatccttggggtttgacttagtttatggtcgagggcgaccggtcgatcaggccgaggcaccggccattctgttctcgtcgaaactctctcaggggtcgccggaaagcgacaaatggacggcatggtcaggccgagtcgaagccgttacaaagggagaccagcttgcggctgccgagagacgtcatcaaactcgcgtattggcctttgcgaggaacggagaccgatcgagttcggcagaaccggagatgcagttcggagaggtggatgcttcgatgatcgcggagtcgacacgatcaatacgggaacgagcgaagcaagccaaatcagcggccgagaccgcggcccgagaaaacgccaagaacatcgaggtggagacaatcaccgaggaacctgctcgtcctgctgagggggtttcaccaacggtcgagcagtcgtccacaccaaagccggaagtctccgcaccttcatcaccggcgccgccgcccgtcaagactgcgcccaagtcgtgggctgccttgctccgtccctcggcatctgcttctgctaaactgacagctgatgctgctcgctctatcccttcgggatctccgaatgcgggcgagccgtccgctgaagttcaagtcgacggcgagcctgtaggcaaagccggtgtttcggcagagggcgcgaagccgatcaagcccgctggatatgccgcagccgctgctgccggttcggctgcttggggtgctgcgggccgctctggcgagttggacctcggaaagctcttgtcggaaggtgtaggcggtctgcccttgtcggccggcgcagcgggactcgcgtctgtgcctcgagggctaatcaacaccgggaatatgtgttttgccaactctgtgagtaggccgagtggccttttacgccatctcccagactgacctcccacttgtcacagatcatgcaagtgctagcatactgcaaccctttcaacatcctcctccaggaattgagcaagcgaatcaaagctgacttgggtggcaggaccagattgttggaagcaatgtgagcgttcaatgtactacctggtcgaagcatacgcacaatctgacagggccgctcgtttacaggatgctgttcttgagagagtttgctgctgctgaaatgggggactcggaagccaacgagtcggggatcgcctcggacaaggcgatccctgcaagcgccagacccgaaaaggtttcgtcagtcgggattgccaagagcggagaagcctttgtcccaacgtatgtttacgaggcgatgagagagaacaagcggtttgacacaatgagggtgagcaaggttggtctgctggattgcgtcgccgtgactaacctcactaccccttcagcgtggacatcaagaagacgccgaagaattcatgggtttctttttggagacattacacgaggagctgctgtacctcgtctcacgacatgagagcagaacggcaaagggtcctcgaaaagacgcaacgacgatcccgaacaaggcgtccgacgatgtaagcgaggagcgagaggtgacgagaccggtcagcccgtccgctggaagggatgatgggtggctcgaggtcggcaaaggccaaaagcttaatgtcgtcagaacggtgggcttcacctagcttgcggcagacatagactcgtagctgattcacatgcgtccatccttgcagacaacatcgcgcgagtcggccatctcccggatcttcgggggtaagctgcgatctgtccttcggacaccagggcagaaagactcggtcacactcgagccctatcaacctctccagctggacatctcggcacctaacgtccatacgatcaccgaggcgctactgcacctgaacgaacctgaaacgatctcgggcgtctactccgcctcgcgagggaccaacgttgacgctaccaagactgtatacctggagactgttccccctatccttacgcttcatctcaagcgattcttgtacgacccggtggaaaacagagtcgtcaagaagggcaaagctgtggcttatggcccagagctcatcatcccatcatcaatcatttcacccgctcgacgaccggctggtagcgaactgcgatacaagttgtttggaggtgagcatcggcgcatcaagttagataacgatcggcagctgatgagaaccataactgcagtcgtttatcaccacggaagtaccgcgacaggagggcattatacagcttgtgtactgaagcaagacgggaagggctggctacatttggacgacgagttggtcgaaaacgttgagggagacgctggagtttatgtaacccgtgacgctgctgttcatggggatgccggtacggttggtcgctcgatgaggagcaagtgcgcatacctgttgttctacgcacgcgtctgagcatagcaatatacatgaatcggaaggaacagcctgccaagtttttaaacgaaattacatttcaatacctgaagtcgattctcgcgaagcataaccattacaaaatcaaacctgcaaacaacgaagcctgtgtagcccctcatttccctgttttgtgtttccaatcaacgttgtcgtctcggcatcagatgtgaaagggcactcacagccagtagcaggtccgaacccatctccaggaggcgtacgatacggcaaacccagccagtccgcagctgcaaaagagacattttcagcatgtgtcgataacgctaagatcccgcccatggcttactcttcatgtagatcgtattccccgaccactccagacgggtgcccgtcaaccccattccgagaaagataaccagagctgtcagaagtgtcccgacatcaagtgctccagccaagacatatgtgtactgtgtgatatggtgattattagcggttgtttcgcctatcttagatcactgactgactttggaccaccacgcaaagttccgatgcctgatgacgtattctgttatggacgtgacttgtaaatcagcctcgatcgagtgcgacctttatccgtgctcgacatacggaacacaaatccgaccagcaaaaagctggcgtaattgacaccggtcgcgggtggcatccctaaaaccccgttaaacatgacaaccaagtctgtttgccggaaccagcgtctgggataacggcggcccaaccaccagataggcaacggcagtaccgcaccgacgattgtcacgaatgtctgtggccaatatagagatcctttactaaacaagcgccgaggcccaatagcacccctgtgtagaaaagggcagaaaagcgatgagctacgcttgggcggggctataacgcgcggaaagcctaccataaaaccccggaattgtagtatacggtggtatagggacaagctgagcagatttgtgaatcatcagaacgtgccacagtgcatttcctgcataattcaagactgactaaactgattctcctgagtcggactgcagatgtcgtcgacataagcaaaaagcatgactttgacaccgaaggacactaggcaggcaacggttgctgccacgatttgaactgtggaggcagaggtcagatggttgatgcacttccaatcagcggcaagttccaacttacctaagaacgtaatacgaggtggaattttcatgtagtgtgcaagcttcatgtcgagcgtgaactgcagagatcctgcaagcgtttgagttgcaaacgatttggcaatctagacgcagccgtaaatgttacctcagctagcctaagatccgagcggagctgaatggcttaccatgttgccaaggatcgagccttcaagcatgtatcccggtatgatctccgcaataagattcgttgccagctaatcaaagcaagaagcctgagtctccggtggggaacaagtgtcaagcatatcgactgaccagatttccagctcgcgcataaaggaaccccgccgggaaatagtatatcaaagtgatgccgatagctatcagcagagagtatactggaacgttggtatcattgatctatgtcgaagaaaagtgggacgcagcgtaagtcagggacaagctatgatttcttaagggcactctacgtacttcgaccgcgatgatcccgaaaacggtcgtgacgacgagcagtatggcaaaccacctagcgtggacaaacaatcaattcgagctcgctcaatcaagcgatctcacgatgcttaccaatcggggacctctgggtattggcgcatcagtttcaggtgtatgtcgtcttcttcgtatttacgagatcgcagtgtcttgtagattcgctcgccttggtgcaagacagtgtgaacaactgcggctgtagtgaggccgaatgccaccgtgaaggtcatggcgtatgtaacactgatatagaccggggaatagctctggtattccgcaacgtccagcttgtgatctgccgtgatcaccctggaaatattatacctttctccatagcgatcatatagacctgatgtcgtgacggggagataagaagtgtcccagacctgcgagggaaggatgttgatatctggccataagcaagtagattgtgcacacaagacgtacgtttgtataatatagtaaaggaacaatgaaccagtagatcacgacgaacgagatcccgacattgacctgagcccaccagggaacgttcagaggattcccggcatagagaatctgtgaccaatcgaaggtcaaaattcccatcccaagcccggtggtgaccccaaacagttgattgacgacgacgttgtctgttcaagcttgtccgtcagcgacgagcttgcagaagggtacttcctggcgcagaagctcacccggttttatccagcaaatccatgagaagtaagacagacaggtcaccaggtaacctgcaaacggcggtagaaggctcagtcagatcttcccagatcttatcgatggaaggactaaccaggaaaaaagtggtagaggaacaccgatccaagggcgatgatgaagaatttgaaacgagatatgccgggcgagctgggatcattgcctgcgtgaagcgtgttcaagtttgtagtaatgaccaagttgtatggccatatcatcgaggcaggccagacaagcagtcgccgagacattccggcgagcccaaagcctcccatttgcgatgccattgtcagcaagagagcgaagctttgggagcatgcagcgcttcagtagagagatctccgcgagagatggtaaatttcgctgacctatcagagaatggctcttcgagccagacttgcgctgccgttgctacgtgcaatccagtcatccacacaaaggaaacgtttgtcatgatagcgattaccgtgtgctctttgatgttaaaaggcccaggattgaggtcaatttctaatccgcccagccagcgtgggaggcggaaagtataaagtggcagggcccatgccataaggcgaccgatcggatatgctacgattctgctccgtggcttcagcgcggttcgttgttcgcgtaagagatgccttcgctgactcactgcgcggccaatggcagaatgaccggtccagggccacggaacgagaagaaggtattgattccagcaccgatgatagcgaagacaagaccgattaagccagaacgtatggtcaagacttgagcagaggcagggtaatcaatcagccttgcgaagcgagctaaacaggcagtccatctcaccaggaagatcgggatcatctatattcgacaccgaagccctgacctctgggaacgggctgtcttcctccagatcctcgccccgattgccaccagcgctagaattggcatcatctgcagcccatttcgggtgtatatttcctaaaccatcccccttcgtagtaatcccatcggggatagtcgtggcaccgtggagttcgcttatattccaagacacctcagtctctgggcgcctccgataggctgctagttctattccctctgcgtggtgcttgtgatcgaacgatgacgcctctggtctggggtagccatcgatcgtgtctgtggactgctggaccgagtccgacaagacccggctgtttttgctgtgtgccgttgaaggcataccgaccagagtatcagagacgacggacggacgttgccctccccaaccttcgcttcgaggattgtatgccgaggcattgaggttatgagttgggagaggcgaaccctcaggagcggcttcgtatggcaaactcgagagaacgtccatgtcggcaggatcatgcctttggcgggctgaagcgggatcgtcgtgtatgtcaaaaccaaaagatacggtgcggccagtatcagcagtggttagcgttctgctcttggaggtagcaagtcgcacgatcggcttgatcggttctctgccagatgtgtgctctagccaggtgccgctgggcgctgcatgccgacttctgacggctgcggtttgcggcctctcgaaagcaaagacgtcagactcttcttcatcgtctgattcgtagacttctcccaggtcttcgccatcttcctcgtcgttgtctggaaagaaggtctgttgtggaatttccccgacagacgacgtagaggtctccggcctggcggtatcgagacgacggtgagaagtcgagggacgtgtatttgcggtatccggccgacgtctttgcctcgcagttgatgggttggataggccgagactaggctgagccatcttcgaggggcggatttaccgctttgagcctcttcacaaacgatgagagtcggcgctgtggattctggcaactgattcgaacggaacgtgccagggagcaactagattcggaaaggctctagggtgggtacgcggtcgagatatatgcacaaaactggtaccttgtagcgggtgagacctaccatatagcttgtaacatatgtgtagatatcgacgtctggcttccgaagctgagcctctgtttgtcttttgctctgcggtgactgccaagccgagcggaatcgcctgaagcgcggaagcgggtacgagatctgtcgatcggttcgtatcttgcttatggggctccctagatgctagatgaccatcttactgtcactgcccatccaagctacatgctacaagctatgcaatctacaagctacaagctacagatttgtataagacacactgatacactctttgctctgtcgcttcacttttcagctgtttgtgggttctgccatgcacacgcgaagttgagatactggatcgatcagtggctatcacgaactcgcgaggttcacatgtgtcatcctttatcaacccatccgaaactgccggcgagctgtcaacaaaccgacgagcgcggaatggctcgttgcgtaccaccaccacacaatgagacccagatcatcgtcgtcagtaagcagaacttgaggaggacatcgtcaatatcattgcatcgtaaaatcgccttgaatacaaggtcacgtcgcacgtcagcgtgaaacagtagtaatacacatccagatcggtttcattacggaaggcgtcgcgaaagggctatctatagttgttgatccggtctggtctgattgcgacatcagaattgaccacaagcaagtctgctaaggctagcagtgatcgcagtgacgtataagttaagttgtcgtcgtgacggtcccacatatgctcacctttccaggagacgctatgcgtcgacctgatatttattgagcagaagcctcgtccttcttccaggcacctgcataagcgcgaagacatcagttgaacatcagttgaggtgctagagcggccaatcgcacgagatccgacatacaaggtcgagcagcggtgccaaggccacaggcgggcttgacttgcgcttcagcaacagcaacaggctcggggatagcttccttcttccaggcacctttgtaatgtctgccgtgagcttcggtgcacctcgcgggaaagaagcccgagggataacttacaaggtcgggcggcagtacccagaccacaagcaggcttgacttggggttcagcaacagctacgggctcaggaatagcttccttcttccaggcgcctgcaaaccgtgcgcataaagtttcagcacggcgcgatcaggctcggatgcccggtcaaacagatgattgcacttacaaggcctagcagcggtgcccaagccgcacgcaggcttgacctggggctcggcaacgggagcggcagtggccaaggtgaccatggcgacaagaccaacgagggcggcggtgaacttcattttgatgcgagtttgtgttgacggttcgtgagtgcaagagtaaagttcaagtgcaacgagctagaatgatgatggaagaagggatcgacaaattagtgcaagaacagttccagtctgtcggggtatatatacgcgtttgtggcccctgcgacttagcgcgacggcatacgaataaagccgagcaaaaatgagacgcgatgacacaggcggcacaaaatcacaggatcacgagatccacccaactcacagccaagcgaaacgtgatactgaccgaggaggacgcgaccgggccttgaatatcgagaaaaaaagaccgccaaagggagctccttccagttcctaggcaagagtggaacgaacctgattcatctgtgatctgcaccgatcgcctctcctttggcccggtcgcacaatacactggacggtactctcgatcgctgccgtagcaatattgtcgggaagggtcgacgtcgtcacgtcgtccgtgacaatcctgccgaggtcgcatcacgggtcgcggtggaggggcttttcgcggcatcaaacccggtggcccgtttgctccgcccgtcgttctcacgatacgcgtctgcctcgctttgaccatggacttccagtccggagccctgcctgtctttgttcaaccggaatacgcccacatggcttcgatgtttgggctggagcctcgttcctgaggcttgtatgcacaagtggagcccactctccggtgccttgccgaagtcggggcgatccgatgaaacgcttcttttcccggctcaacgatgaccggcatgaccggtcgagtccttcagcaagacctcgcccgaaacttggcgtcatactgctcgtttggtgacccgagctacgcgacaggcgatgttcaccagatgcaagatgcgtgacgtgtcctcagatctcaaaggcatccctttgtgctgtaagcgaatccgaagaccaactcaaaggcccttgagcttcgggccgggggttgatgggtctatatccacgtttgacaatcacaggacagttccttccatgttcctcggcgagttaacgggtcgaaacaatccggaacgtgtcatcattccaatgacgctgccgggcggtcgcggccaccgatctgcggctactgcatgaacgacacttggcgctgaaacttggttttcagctgtgcaaagtgatccaaatccaacctcgcttcgccatagatctggtcattgtggatggtgacgaggagagtctgactatacaatttgcctatgttttatacccaacaagctggacgatcaggcaccaggtaacaagaagttgagtgccttgtcaaagttgtaatccgctccttccagtgcatcgataacgaggttcctgtcaaagcccatgccgcaaagctgcgacgcgtgttacgcgtagtcagtctcgcggcggattctgattgtggaaatcatcgacttaccttcttcacgtcagaaagatcgtccggttgagccttggtcatggccgcagtctgcctctgtggcagaacaggccgttcgggttgagggggaggagccgcgatggcgacaccgctcatacccgcagcaggggcagaatttgccgctggtaaagcatcctcaaaactgtaacatccataacttcagctttcgtcgtgacatggcgaggccttgccgaatctgtgactcacgtctgctcgcttcggtccataaaggcgtcctcgaatgagaatcccgagctagtgctagggttgatcgttccgaacccgccctgacccccgacttggggcaattgcggagccccctgatgagcgggaactggagtaccagccatggaaggcttgttcaccatctcaaagtctggcgaaaagtcgtcaaactcgtcatcaaaatcatttgtagccttttgcgaagcttgaggaggggcgacctggtatgcaggacccccatcggcgatctgagcgggctggagatcgtcaaagtcaaaatcgtcgtcgaatgacgagttcgactgctgcaccggagcgggcgcggtttccgagatcgcgtactgattcacgaacggcggctgcgctgtctctgcagcaggtaacccaaagggattggacccagatatcgatttttgagacgtgggaggtggcgggggctctcgtcgcttgggggtgccggtcgctgatgcactcagaggcgtcgcttggggagcaaatggatcgaaagagtcattttgatcaagcgtctgagggtatggggacgtcccagtcgtcgcgacaggtgcaccgagtcccaatgcctgtagttggtcgctgggtggcaattgacccgcagctatcccgacaggagattggctgcgcgggacatctgtctgctccgtccgtcgaaatccatcttcagtttcgacttccgccgtgtcgcggtcggaaccccgggcactacctccggtagatgggccttgcgcatctcggggagtgtacggcgaacgtgccctgtcgagatcttcaggtccgccctcatcctcgtcatccgaagaatcgtctgagtcatcatgttccgtgctcacacgaggctggagagcttgtacatcgacaggcacagcggtgctctccacgctcatcggagtcgacggaggcaattccgtctccggcgtgtgaacgatactgttcggcgcgaaaacttcagtagagaaagatcgaccctgagcttcaagatcgggtctcatggaagcaggaatggctgagggagcagccgctcggtcatcgagggcttcctggaaatcttcagctgtctgggaagctggcgccaggttgtcagggaggggtactccaccgctggacatgccttcctgccctcccgcttgatgagcctcgaagttcgctccttggttgggtttcgaaaagtcgtcgccgaaaccgtcatcaaatccggacgagaaatcggtttgaccagtctgagggccagtgctgggcatgccaaatggatcgcttgtcacattggcggaaggtgtgggctgcctggacgagtcttgtacgtcgaggtcaaaagggtccgagcgatcttgaacagcagcgggagtcttgacgtcgtcttcgttgacttcatcttccacttcctcgctgggatgcgtcgggctcctcaggtcacgtccatcgtgagtcatgtgctcggccacggtagcagccgctgcccccgtgccgatagcagcagctccgactacgcttccagcagcaagaacgcccatggccgctaccccgccgatacccatcgttgcggcctgcaatgtcgaaatgccttctccttcatcccccttgacagcgtttccggtgggctgcggcggcgaaagcgcgcggtcgacaggcttggaagcgaatcccatacgctcaaaggggttgttgctacgctggtttcccccggtgaaattagggctcaagacctgctggggagtcacgggcaaggggacagcagcagcttggtgcaagctggcggtcgaagcggggcgaatcaagggtgacatgatcgggctcgtagcttgagacgacgcggcgagcgtctcttcctcttcaacaggtgcattgtttgccgcagcgacctgatcaatttccttttgcacagtgtcccgccctccttcagcagtggcgacctgcttcttgctgatcgcgaccatgcctttctgctgtcgggcctctttcttcagcttctccaacaaggtcttcaaggtggtcgtctcatcggcaacgctcttcatctgcttgcttgcagctcggacctcctccctgtctcgcagcagggcctgctcggtctcgtccttttcggccctcaatgctgacaactcgctctcgttctggatcagatcctgcctgagcttggtgatctggtccttctgctccgagacgcgcgtcctcaagtcggtcaccagcctggtctcagtctcgtgctgagctcgaacagatgagagtcgtagttcgaggtcccgcagttgagccgccgaagtcgatgattcggcctcgagacttttgcgctcgcgttccagatctccaagagccttttcggtgctattgagcgagttctgggcgttaccaatctcggcggaatggtcaacagtaggcttgggcgtcgagacattgtcatcgcccatcagatcggcctgggctccgaagggtgtcgagccaaaggcatccatggtcgcactgcgagagggcacggcaggaggactagtcatccgcgaagggggtgctgcagggctctttgcccgcattgctgccggaggagggacattgacagaagccgctcgactgggtggggacgcgaaatacgactgctggggtggcattgacggttgcatagcgggtggcgaatcgccaaagacgtcgaacaagtccttggcagcatcgtctagacgatggcgcaagcagtatgagctctggacgactagtttaataccggcctgtgtgctatggtcgacttactctgtttggggggcgcgacctgatctcggagagacggcgggatcatgctctgcggcaaggcagagggtagatctttcccagcaagcttattattgatcaagaacatagcaacggcgaactcgtctttgccgagcttcccttcctttcgaatatcggccaagtccctatatgtcggaaactgaaattagatctgcagacgtactctgatgtacgattgatactcaccagacctgagccagatccgtctcagggagtccactctgcatcaagaaaggcacagcgatatctccctctatgtagccctttcgaccggtatcaagtccgtcgaagaatcggtcactcgcgacctttgactcggaagtgacatcccaagatggctgggcggattgagcgggctgtgtgggagccgcaaaaggagcctgcatcgaaggcgccgccgagggaggggcagtgtactgcctagacggagactgagcggcgatactctgaccagtccgttgaggctgcattatcccctggcccgtcaactgctggctcaatctggccggtccagagccggtcagctgggcaaccatagggttcgcaggtgcagttggcttgggtcgtccgcccgaagcctgttcatacaggccgggagggagggtgatgggaaggtccttgatggtcccggtcataaggtgttggagatagtacatcccgatgatgaaatcgggcaagtcgagagatcctcgctgttgagtgtctgccagattccacgccttggccagggtctcagtagggagactgctcttgacgaagattccctgagccttggaggcactgagcagaccgttttcaggtccagcgccaacaaagagacgtgtgaattgggccttatcctgagggttgagaggtgggggtagggtaccggtagcctgagtcgggatggggttggccttgggaggcatttgcccttcgaagataggatacggtccggctgtaaatagaaaggatcgttggtattgtaacatccttaaatggatcagctaccagacttacctttgttggcaagctcttccgtgatgctgtcacccttttgagcccaaccgataagcctgcacgctcggtaccatccatccttcgtcagataaccattgttggcactatcgacgatgctccagattgttcccagagtcgcttgaggtaatttcgaggtcaagagaaaggcatagcaagcctctcctgtcaggactccgagctagtagagccggagatgtgtcaaggtccagatcagcttcggtcatggcgtacgaattagtctgggagtggactgacctggtctttgtcgatgacattgaagagacgatcaaagtatgacctctcttccgaagctatgggcgatttgcgagccgtcgctcagcgacacgacatggcggaacgagccagagctggcgtgacgtactgtattgcgcgttcatgatcgcagggtccgcgtcatgtactactggttcgtcttgatacgggtcactgtaactttcaggcttgacagtagttcaattgacttgttgtgttctgtggaatctgtctgtatgtgctgacagcgcatgattaggatgaggaaatgtatctctagtttgaggatgatcgatgaggtggtatcccgaaccgtcgtcggtcgccggcggggaagtcatgacgtcgacgttgagcaggtcgaggctggctgacatttataacaatcacgaaatgacgactagctcactagaaaggtcccgatcgagacgccgacgactagtagattcatccttcaaccatggagtcttgaagcgaacagagacgacgatcctatcagctcttgcttgcctgcccgaggagcttgcgaatgtacagatcgctcctgcatttcgacctcctcatggatacatgcttcaggctacaggcatacatgtggccagcaagggcatagctgctcgacgaacaactctggtcccccttctacggagcataaactactcctatccggctcggaacaaccttgttcttgctggacaacggcgacatgcatcgtcaactccagatgggaatgtcctttcagatgtcggtcccgcgttgcaagagatttcagcatcaaccgcaccctcgacgagcgtcctactgctcgcacttttcggtttacctctcgcactatggtcgtacaaggtgagtagcagctagaaggtagagtaattatcgaatgacgaagcccaatgaacgtgttaccgtccctgcagtgcctcatgatggtcttgtttcagcgcaagatcatctacatgggttatatcccgcccggagctagaagcgaagtgagcactcgaatcgtctcacagggactccgtcatctgagataactgcggttatgctagacgctcgatgtcaacgaccccttactctcgggtctaaaagcggaaaagatcgttgtacaaagcgacccaggcgtccagctcgaaggtttcatgctgcgaagattggcgtcttcgctcggcaaagctccgtctcgccgggttgctatcatctactttcagggtcagtccgagacgctgttctcgctctagggtatcactcacaagtgtcgaggctgtaggcaatgtgggatcgcctatacagcgccttcccttgttccggaaactctgtctagccggagaatcgagtcacgggctagaccatgagctagaagtcgaactcatcgcggtcccgcctcggagttatgggctttccaccaacgttcgaccgaatcaacgggctttgctgtcggactattcgaatgtggtccgacacgttacgcagaaatacaccgagcttgacaagcgggacagtaggcagaccaagatcgtgtggtatggacatagccttggagcatccatcgccacatgcctactctctacagtgtccgaggatgagatgagggaacgtcggatgatttgcgacggcttgatctttgagaacggattcgccagcatcaaggggatggtccggaccctgtacccccagcgtttctcgccgtattactggttgacgccctttgtcatggacgactggaacgcgctcgacacttttggatcttgcgcaacagattcgattctgaactcgactccgaaactgtttgtagcgtcggaaaaggacgagatggttccgaccggtatggtgaagcgcgtctacgagcgggctgtagatcatgtccagcccggtacgccgtgcgaatggctagggatcaaggatgcattgcacgactttgcatatcagaaaccgagctgggccaagggtctgtgggactttgtagcgaggttgtatacgaagccgagttcctctcgatatgaatctaccgaatgagcgtcggtacaatttattcctgagcggttcgcccttatcgcgcggaagcgaattcggaaccgggtgcgagcgggcgggaagagagcgaacgagcgagcgagagtttgggaaatgatgcgggggaaatgttgaaaaagctataactcgtcgagatatacacatgtctcttcacacatcgcagtcgcccctatagaccttgatccacctcttttgaatctcataggcatcagcttgcagcttgacgtctttccgttattgctttcgacgatcgctttgtgtcgaacccgattcccatactcttcaaaacaccgcaaacttcctcgacccgaaaatgtctcctcctgctgatggaaagctcccccgagagtcgggtactgcccgagtcgcaggttcagccgtcgccggtatcaccgagctggccatctttcaccctgtcgtgagtacaatcgagctcatatgaccgtgtcgcaggctgacgtcgacttgacgtcttccattaggacaccatcgccaagcgattgatgtcgaacaaggccgctttcaagatgagcgagatgaacgaggtcatcttccgaaaagccgccgacaaatcggccggagtgcggttcatgtcattgttccctggtgagctcggtgtgacaagaagcctgactttccacaagtgctgaaggcgagatcggacctctgctttaggtctcggttatgctgctggttacaagatcgctcagcgagtgtacaagtttggaggccagccgtacttcagggatgtcatcgaccgatcatcagccaagccctactttaccgacgctttcggtgctaaatggggaaagatggtcattcacgctaccgccggtagtttgaccggtatgggagaggtcgtaagtagtccgaacaggtcgcgtgcaagtctccctctggggcctgatcctgagtcggtaattctccactataggtccttctgcccttggatgtgctcaagatcaagatgcagaccaaccctgaggctttccgaggacgaggtatcgtcaagctgatcaccgatgagggtatcggtagtttgtacaagggttggggatggacaatgggtcgaaacgctcccggcagtttcgctgtgggtcgcagttcgtgtctaccataccaatacccggcgtctgactttgaattcgtgcaaccttagcttttcggaggttctgcgtttgccaaagagtacatcttcaagctgtctgactactcgcaggctacctgggggcaaagtaggttcagagaaagccgatcgtcgggacgatgaacgtattctgacaagctcgtcaatcttcgtcagactttgtcgcttcgatcgccggttccgtcgcctctattactgttgccgcaccgctgggtacgcttctggacaccgatacagctacttaacctcgtcactaacgttactcgtgccccttcggttcatagacgtcatcaaggtcagtgattctatcaaagcaagtgtcacattcgcgcttgcatcgatctgacgacatgtcctatgatagacccgaatccaaaacgccaacttcgagagcaaggtctccggtgctaccgtgttccgggacctaatcaagaacgagggacctggtgctttgttcaagggattgactcccaagattggtgagctcgacgcgaatcttcgatgactggattgtcacatgggctaaaccgaaccgattcaatctgtagccatgaccgcccctaagctcacgtgagacaatttgccgggacacatctgaattccgaaaactaacattggttcctggtctgatctcgcagcatgtcgttcgctctcgcccagaccctcattcctatcgtgagtttaggacagcgtccagatttcatcgagtccccgctgatcgatacatcctgtttcttcacgatagttcggaaagtacttctagaagatctatttttcgccaccgtcaccatctaggctgccttttacgctctcatgttgtcatataactagcaagcatctccgctcccttccccttgtcttgcttggtgctgccatgcccccctcaaaagtatatagatgtcgtttgatcgaacacagatacacgccacgcttgacatggatcgtatttccaccctacatacctctttcagtctgataagggtggaaataatttccattggtttgtcacaaaaatcgcgatggtcgagcctccactactagttatccagggtctttgagtcgtcctcgtctaggtcagctttccgattattcagcttatacgttaggcagattcagctcgggagtcctgttatataccgccttaaagaacataggagaccagaaccagcttcttaaaaagcctaaatatctcccagaacattttaaatccagaaaattcactcagtcatgtccgaacaccctgagcaacacgaacacgagcacgagcacgaaggctccgacgaggagcaggaagatgagcagtatattaaccaggaagacatcgaggtcgtcgaagagtcggacgccgacgacgagcctatggacgaggatgatgaccaggaggatgatggcaccggtatgatcagtgccaacttgcctctggaggacaacagtattgcacactccagtcagtaggagagcattgagctcaataagcatctttatgctgacatccttcttccccctcgtttgatagtccaccacgagtcctccattttccaggtcgccctccacccttcgttccctaaccctcctctcgccgtctcgggaggagaggatgacctcgccttcatcttctcccctctctcgcccttccccgacccttcttcctcaaagtacccgatcaacaacaccactttcgagcccgtcaggttgaccggacacaccgactctgtcgtcacctgtgctttcagcgtagacggcgagatggtcgccaccggaggtatggatggcaaggtccgtgtctggcgtcgggtcaagggaaagcagaccgaggatcagactaccgtcgaggcctggaggtcgtgggagttcttgaccagtcttgacactagtgacgagatcaccgtaagtgcggtgtcaacgtcgcgaaagtgaggctatcgagggctcatttaggatggtatactcgcgcagtggctagcctggcaccccaagggacccgtacttgccgctggtaccgagggcggtaccgtctggatgtggcaacgtgagtcatgctgcttgtcacctcagcgctacaaatcgcaatccctgatcatgttcgtttcactcgacagtacccagcggaaacaacatgcaggtcttctcgtcccataccgaatcgaccacggccggttactttacccctaacggaaagctcttggtcaccacctcggccgattcttccgcctgcgtctttgaccctcgagagaatgctcccctgctgcgactagctcctcaccagactgccaactttggccgattcgaagagggaatcaccgcactcgccgttgcacccgcttctaacctgctcgccattggcggagccaacggtgctatccgagtcatcaacttgcccgatggcaaggtcgtcggcaggattgttggtcaccccgaaggcgagtcgatcgaaggactcgcgttcatggacatcctgggtctcgctggacccggtggtgatggcagcaccaagggattgctcttggtcagtgccgctaccgatggcaaggctgtcgtctgggacgttaccaccggaaagcccagggccgaggttcaccacgaggtatgtcgcagagattgtagggaagacgtcaatacccgtgttaacattctacccgctttcgtaggacgtcgtgacctcggtctttgcccaccctgctccccgtaggttcttgttcaccactgcttcggctgacaagaccctcaaaacctgggacgctcgtcaaggtgccttggtcgccactcacaagggtcacgccggtacgatcaacggtctcgccattgcccctgcgcctgccggatggggagtcgccgagggcgaggaggagaagaccggggaagtcgtcgttgtcagtgctggtgacgatggcgccgtgcttgtctggcgtgtatagatgtgtgtcggtagtcggaaaccattaatcatagattcggcgagacactttcgtgttgccaagccgtgtcccgcgcagcagtatgaaagagaggtcaatcggaggtgaaaaatcagatcacgccttctgtcgtcttcgacgctatggttgtctgctattaatgacaccgtgtcgaccgccataggcatgccccctgatgtccgccatttcttgcccgaagctatctctaaatcctttcttaacatcgaatctgagcgaactactagtattttctatgtcttagcgcttctcacgaatccatttccgggacgtgttatccatcttcgtctgtaattccggctctgtcctttgatttccctcccctacaaagggtgccgtcacggctgcagcctggattcgctcatacctcgaatatagttccgcggcaagattctgttgatcctttgtgtgcggtagccggaaccagctcatgctttgacgacgctcgcaccagctcgcgtttcgcaaggataaatatagtttgcttgcgcacagatttcctctcgtatcaacggctatcactaatcgctgcggtaaaaaaaggggctggtagatgaacgatagcagcagggggatatgtcagtgaaaatactacgactttacgagtgtacccgtgactagacagctgaccagttccatggttttagtgacgtttcacttggaggcgtgagagcttagaagcgagattgtcgcggcctggcttcgctatgtagtagggagagaaagcaggtgcgagaaaacgactcagaatctcgctcaatcaataatgaccggcacagcgctacattcagtgacatcgaagaccgcgcgctcaaccggtcgaaagctgtgggccttgacgttctcagtttcgtataagacaagtgaagcgaaaagggtcatcactgaaggctccatcctgattctgaccacggctggtccttggatcaagatctatccattgtcaagatactgagcatagccggtgaccgttctgtgaacaggaccgtttttgatgactcggtgtgggtgccattcgcaagagggttttccagaccaacacgtcaaggttctcaaatggtcgaaaagttcggatttgcggcgtgaggaattcaacgatggctctggacagccctacaatgcctgaagcctgggattcgagccaattgcgaagcatacatggtgttgtcaagccagccggacatgtgctgatcacataagtatatgatcgtctcatcccgctgatcccgcatgctcggattgatagctccagccatcatccgttatctctggcgctgattcgcgatcgctcttccggcgccttgtccaactctgtcaggtcgacatacgcatcgtcatccctgatctttcccttgttcggtcgaatccgactccgactcctactccgactcttccgcttgatccctcgcccgctcggagtcctctccatgcggatatcatcgccgtcactcgagctggaatccgaagacaacatccgcggaatctgtcccggaggagcgggctcgtcgtccaattcgtccagcgggtggcttttggtttgatacattggctgtagattcctagttgatcgtgcggatctgctcggaggtgttggacctggggaaagttcgggcgatcggcggggagtgcggtttggtgttctggtaggcgtcctcgtcgaggtctttggcgttggcttcttaccagcggcgctattcctgttcgttcgttcgaccgagaacaatcgcggtcgtcccctgggtttcggcgtgaccggagggaccccgttgaagttcctcgtagccgcttcccgctcggcttcgccgtcgtcctcgttgtcctcttcctcttcatcatcgtcatcttcgtccattcgatcgtcttcccctgcatcgtcttcttggtcactccaagcgtccttttgttcatcgccggaagaatctgcatcttccgtcatcctcccatcgatggcaacgagcatcgccttgatctgggacacacatggtattatcaatcgattagccggctagcagcgcgatgcaccggccaacccaaacaagcccgactgacctctttgacgaaaccccttgctacgctccctccgacagcccttctgatgacgcccaacccgggatccccagcatattgcgccctcgccctcgccctgtccgccgcgttcttttcctcgtccttttcaatttcgacggccgcgttgaacctgacgagtgcctgcctcaacctggccacgtcccacccttcgagatccttcctcgagcgagctcccggtcggaggtccaagtccgggtcgatctccggatcgtcctcgtcgtcgcccaatcgcaaggacgaaaagttggacaacctcgacggggtggacgtcgacgcgggagacgaagggtaatgttgggtattgggaaattgcgagtgaccgttcgggtattgagagccgaatgggtcgggataaactttgcggggttgagcgaggtagaagagaacgaggccggtataggtatggatgatggccgaaagtgcaaaggggaagacggtaaggtaaagttctaggtgttgcagtgcctcttcgtagaggtgttgagaaagtaggtggacgacgagcgaggtgaggatttcaggtttctacaccatgatcgaccgaattgtataattatcaaaatcagaccatagtgatgttggaatgtcaagcgaaacacggcgcttacctgccactgatgcgcgaccgccaacatcctcttcaggtaagcctctttcgcacgatgatccatcccgtccctgatctcatgtaacctcgccgtgtccttgttcatcggtcgagcagaagaggatgatgacgacgcggcctgcgtatcgttgaattccgggtagtccttgtcggactcgaccaggtccaagacgggaagagcccatttccatgtcgaccgaaagtcgatctctgggcatcgtacctgcacgcccgtgaaattgaacacggtatcagcctatatcttgacgggaactagccagaatgacgactactgaccaggatagcccaacatgtatacgctctgacggtatccctacggtgcaagctagcgtgcaataggttgacgaggttttgcaagtagatccgcctgtttgtcgttacgtagagtcgggtgtacctcggatccagcgaggtgattttgtacgcgcctccagccatgtcgacccagtgaggtaattaggcagtcatgtgttgctatctcgtcgttgtcatcatcatgatcaggaacactgtctaggattatctcgagcctgttaccatcgtcgtagtctaactactactactgtcatatgagatatgatgatgtcctgttggatctaaaccggaaccatttatttaattatttctattccaatttacttccgacgcgcgtcattccctttatttccaccccccacctcttggttgtttccaccttgaaatcgacaatttcgagcgatccaccacttactgtagagtaactacagtcgagtatgctcaattgaagtcaactcatgacaatactactaccggtcattaacaacagacctggtcttaccatctctaactatcatgccttccataaagagaaaggccaacacagcctccgagtcattatcagctccggcaaaggtgagggtcgagaggcgactagcccgggactcgaacgctgacctactgtgatcccgaacgtcagaaattggcaaagaatcagtacgatggacagaccagtgctacccatggtatgatgtcagctgccatgatggatggcatgatcgacgatgatgacgaggacgatcaagatgacgaggacgatcaagacgacgaggacgatgatctcgcggatcaggctagcgaatcaggagacgacgacgaggacgagatgcgatcggtggacgaagacgacgccgctcctctcgaggaacaggaagagaccacgagtgcctttcaggatctcgaagaggatatcgagcaagaagccgcggtctctcgaccaaagaagaatgacaaggcattgttcagaccacctactgccgaggagatggagatgctcaagcgggaaggagaggaccgagggtcgtcatttgggttcagcatgaaggtacgccggcagcgttgttgaacgtcgcagtgtccatttcgaaggtactaaacaccatccttactcgtgcagatcaccgagctcctcactgcgacattccttgatccattgccagcaccatcgacctctttcaccccgccgcctcctgcatctacgctgtccaatctccttacctctctacacacgcacatcctctctcttcccactctcgcgcctcttcctgtggactcggccattcaacggctatccccgcacgtcattcctttcgtccacccggcaccgacgagcaagtctgtcaagtggaccctcgggtgggaaaaaccgagcgaaatcctgatctgtggggactggagtctgatgggtcatcatcgacgtggcaaaaaggacggcatcgtcgagttgaacgcgatcgacatggccgtcgtcatgcccgactcgctctttacggtcaaggatcggacggccaaccggtactttcagaagagagcacattacctcgccgtcatcgggtcgtctttgtcgacgctcatctcgagcaagaacgaaaaggcgagcaagagcaaaaagggttccgcagggggtgattcggggttggacgaggtttggaagagcttgacgatcggttgggaatgggttggaggcgacgagcggagagccgggttggtactcaccgtgcctaaaagtaagtctttccatacgattttgctaacctcgattcgactcgactgacacggacacgtatagacaaatccctgggcttgaagcacacctataccatccgactcttggcatccatctcccccgacctgttccccctctcctccctttacccatcaaagtctaacctccgcgtccagtcatacgagcaatcgacagactcgctcgaatcaaaaccgaccccgatctacaacacctcgatcctcctcgactcgtcgcacaagtctcacctcttgtacatgcaccggttgcacaaatcgtgcccatccttccggtccgccttggcgctctggaggatctggggcgatcgacgaggtctctcgacccggtctggaggaggagctatcgggtggagctggttgggaagcatcatcctcgggttcatcattgatggcggagaggtcggtgttctcaacaagggagaaatctcgacgagggcgaggaaagggctgggaaggggattgagcgagtggcaattattgcgagcgggttgggagttgttatgtgagttcccgcccttagtgacggatcgctaggagattcgaggaagaaaacgaattgacggaccggtcgtcttgcgcgtctcagcttcgacggactttgtaaagacgcccatcttccagaaatgcacgacgggtgacaaggtcagtcacctcaatagcccccactacctctcggtcagctgacatcgtgtacccttgtcttgcttgtaatggcaaatccagatcccggcagcagagttcgtcaaggcgtttgagaacatcttggtcgaccactcgggcaggatcaacgtattcagcggatgggaaatgggagaggttgatctcgtacgccttcccttggcctgtctttccaactcccaagctcaccctcgattttcgtagctccgacatcacgcacgcacaacgctgagcatgctcgctcatgctggttcatcggatcggttcgacgaggtgttcttgcgcaatgtcagctcacccgttttgcagtttgacgagatcttcacgtaagtatcctggagctctgaagcgagtgagatatcggctcatcaagttgttttctatagcgtcgctgctgtccccagccgaccgggtagtaaccctgaccatgcgagcgggacacgagcgactgtgcacgatctcgcttcgctgttgcggcgcggtctgggtagacgtgcaaacgtcgtcaccgtcgacttgccccgggcttccagctgggctacgaccgaaagtcatgacagccaggatggacccgtccagatcggtctgcttttgaacaaggagcatgcgttcaacatcctggatcaaggcccgccgtcagaggacgcagctggatcagaagcgttccgacagttgtgggggtccaagtccgaattgaggaggttcaaggacggtcgtatcaccgagagcgtggtctgggccgctcagcgacccgaggagagagctcttatccccggacaggtcgtccgatggctattggctacgcatttcgaggccgacgaggatgaggtggtctggaacagtcccgactacctgcctctgactcagatccctagtgcagcacatcgcttgattcacgccgaaggatccgaaaaactcggtttccggcccgtaatggaggcctttgacagcctgtacaagacgatcaaggccgcagatgacgatttgcccttgtctgtcctaaacttttcgcccatgtcgccggctctgcgctacagcagcacattcatcccttaccccatcgacatgacccgggcaggatcggcaccggaaggcattcgatatatgcccgtcgtcgatgtgctcgtccaattcgagagctcgaggaaatggcccgatgatctggtggccattcagaagatcaagctggctgtgctcgcaaagacggccggagtactggagagcaagcttcagcatgccgaagtatcggttgtcatcgacccgtacgcgcccgatgtacaagacagcgcttcgctcgaagtcgtcatgggaagtggacacgctttccatctgcacgtccaacacgaccgagagcgtaccctgctggagaggattatcgaggacgcagacacgccttcagaaaagttgaggaggatcgctcaggacgctttcgatctgcattatcgtcgttacagcgctgcacctcgtcatcacggtgccattgtcactctccaccacatgtatccctcgttcgcctctgctgggcgactgctgaagcggtgggtttcgagccacctgctctcggctcacttccccgaagagatgctcgagctcgtcatggcatcggtctacctcgatcccggtgcgcacgaggtaccttccaccgcccacgcaggttttgttagggcaatcgagacgctcgcctactgggactggaaatcgtcgcctctgtatgtgccgctgtacacagcgactcgagatcacgaccaggacacctctgtcgggctcgtctccttccccgaaggtctccgacgacaggcagagtcgtcgttccaggctatccgcaaggtggacaaggacttgcacaagtccaccatggttgtcgtgactgagcaggacctcatcggacgagcgtggttgcctcttggattgccccatcgcttgatcgcttcgcgcctcgtgacattggctcaggctacgctcgcagcgctccaatcgccgggtgtcgatgtacaagtgagttcgcgaagaggctcaacataccagtgtcgtcatactgaatagtatccttttgcctgtatagaacctctttgtgactgacttgacggaatacgacttcatcttgcaccttgatcctcgtcacaatccccgaacggccgagagcatagctgcgcgaacggatgtctgggtctccaagttatgggaaggtcatattcgtaaccaggttgtcgcgggcatggctgccaactcgatcaaggcgggctttgacccggcttcgatgctgctggccgatttggagcgaatgtacggagaacaagcaatcttctttcacgacaagcacggcggacaggttattgcgggtctatggaatccagacgtgttgcaacaccggaacttcaagcctttccttggttacagcgtgaaaccggtcgtaaacaattcgaacaaggtacagtctgctcgtggccgacaggcgcctcgcatcgctgactctcgataccgctcgcagacttcgacaatgacagtgatcaacaaggagagcatcctgagcgaaatcggccgactcggccatggacttgtaacaaaagtcgaggttttgaagcacaagtagaatgtctaagattggcatagatgtatttctctctgtcacggttgtatgaagatattctagtattccgatcaacctcctctacatttgccttggctagccatgttgatgggtctagtagacaccggggatgaatcggtacttgacgactgcaataacgagaagatatcagtctcgtgccaactggattgagagatgcgtattatccttaccctcagtgtatcgcttccagctatttcgacagccgagattgtcagcttcaaaaatcaggcgacgtctacgaatctatcaggactcactcgtctccatactttcgagcacacctttcaaaatctcgtccacatcggtggatcaatacagtcatgaagaacgccgggtaaaagaaggtgatcggggtgttgagacccgccgagagaccccaggtcaaggactggatccaatcggcagtatagttctgagtccgtcgtgacgagggtcagctggtcgctcgcaatgtcgctgtcaacgagactcaccggctttcgggcccaggcccaccatccgctcgtcaaaagcttgttactacggatcgcaagagtggtcagctctttgtgccatcgtggagatgaaagcatcgcaacccttacccgtgcttggtctggataaaggtcgggttgacgcagacggaaccggggagttgagggaacgaagcacggggcacgtagacaccctggctttgcatcttgaaactggcgatgttcaagacgagtacaatcaatattgttctcgcgcgaattgccaatctcgagggtcgactcacgccgacttttggctcatcgaagtgtcgaaactggtcggaccccagtagacacgaattcagctcggcgtcgaacgcatctcgttcggcatcattatgactcacacatagtatgcacagcacagggtggtgaacaaggcaaagtagaccatggtggggaattggtacttgacagggtcgttcctagccatgtacaagatcgggtaacagtaggtgaagggtctgggagtaggcgcgtcatcagtactgtgacatgaatacttgatcaaagactgattggggcttacacgccggccatgttccagaagatgagcatgaacccgaacttctcgtggaacatgtcccactttatgcaagcaaaatcgatcgctcagcttttgcgcaaactcggccttgtccttcgaatgtaggacttcatgtaggacttacggtctgagggatcatgtgctcgcccttggcgctgtagacatgtcgttgcggcggatgagcctcgctattgtcagtccgtgcgactgtgacgactcaccaggcgttgatgtaaagaccggtagcgaggatcatgaacagtgcgttctgtacgacccgaactattcagctcgtgcgacatggcatcgggactcgaccctcactcacgggcgtgacgtaaccgagatcttcgtactgcttgacggctcccgagacggcgatcatgaacaacaagacccagggtaccctgacctctgcaaacatcttgaggtcgaccccgtcccacctcttcctccccagcgcgaatacacgcgaggtgaacaccctcgggttcaaactcgcgcccatgaagatgtcgtagatcaagttgcccgacatcctcatcggtttcccgccgtaatgacaggtaacggcgagggaatagatgaggatggtgaagaagaaggagaagatgatggcccacgtcatgagttccccgaaatgctcgatgaggtgaggcagacggaagacgcccgtcacgtggaaaacgccagcgagaacgatggtcgtgtaaaacgaggcgagggcgttgcagtggtacatcaacgacttgtaatggagcgaggggacgggcaggcctgcaaagtcaaacgttcaaggtagacagtcagtgttgggtacgagtgcgagcatgtcatcaatgtcgagacacaccttcctggttcacaccgggcatgacgagcgcgaggaccaactgaatggcaatcaagctcgcataggtgttgaacgcgtatctagtggggtaagcatcctattcgattcgcaatacgacggtccaatcggtaccatcacgagagtcagcatgatcccgtcgtaagccgacttaagagtgggcagcttacctttttgacgaacccgaccatctggttcaagaacgttccaactccgcctttcccgccccaagagaggctggtagggtggacgagcctcccctggaagtgccacagacagatccaaaggtagtctatgtggtgcgatgtagcggtacatgggaaaaggggagatgacgacgaaggggtagaatgggatcgaagcggaatgtcgatctagtcagttgcgtatccgatggataaggcaaagaggagcaacggggcttacacatgagacaagggaaaccgagcatcatcgctaatgtcccgacaggtccaccaaactcccacctgtatgaacacgagcatatgtatcctctcgtcagctcgtcctccacacgctatgacgccgcccccgtcgccagtctcgagactcactcatcgtgagcgtccagcttcctgtcaatttctcttccatgctcagtgatatgactagcataccctgcagctttcccatcgtcgacgtttccattgccattggcgtatccgttgacgtgaccgttggtctcgatatcgccctgtccgttggcgcggccgttactggtggacccgttgacgggggtcgcattgtttgaacgttgtcggatggcagaaccatctggggacggcatgattataagttagtgactgagcgaggtatatcgattgctctgatctattcagaagagtgacacggcgatgatggtgtgtgatggtcgcctttgtgtatgtgtatgtatgtatatgtagaacgagatggtaccatgcgtcgattacgatcgtacgacggacgggagtgttcaacttttgaagaatgttttgtttacgttgtcacgcttgatcacgtaaatcacgtaagcacaactgttactctaacaatctgtcagcatgatccgcggataggacattcaaggaaactcgtgatggaggcaagtctcgatgctcgacgatgatgtgatggatcgtaatcaggcaactcttcatcacttatgtccggaacatgtcatctgtccttcacctcctcgacattggtcgatcgtgtggatcgatgagatcgttacgtcgagccaaaaccgagtgtgccagaaacgggggccgggagacaatatcggatgcaaattatcatccggttgacgaatacttacttgtaacttctatgcacgaccgatcatgaacagaggtcggtctacgtgctaccggcatgattacataccatcgcaccccgctccatcttacatcctgaaccggactcaaagtaaagccagctcaattccttgaacaatatgcgagcctctcgactatgccgcacggtgaacggatacatccgcccatccgcacccccatcgcacccttccatcgctccgaccgagttgcatacccaactgaccagcgcttccccatcccctctactcttgcctggcctcatctcccactggcctgcacttgaacgatggagaccgtccaacaccatgggtaaccttcggaacagcttggtagagaacacgcttgtcgatgtcgaactgggtggaaaggggaagagctacatggagccggatcaccgacgagtccagatgcctctcggtaagtcgacctaccagggtcaactttggtgaatctattatatcaaccaagatttttgtcggacttgccttatcgatccaaggtcaggtctgtttatggacgcgttcatcctctccagaatcccagggtcggagcagacgtcaactacgggttacctagcgcagcaagacctgttcgacctcgtacgtccgcgacctacccggcaggattttcaagtttctcgtattctctgagtctaacatcttgtcttggcgtacatcccttcaacctgcgtgttgccgacgaactctggcgtctccgccgtctccagataccagggctggatgaagacgcgccgaccttgccccatgtctcgacgagcggacctcgtggacaagcatggcgacggaacgtctgggtggggaaacacacgttcacgccgatccatcgtgatccatagtaagtaggccggaacctctttcacatgcggtccctatcgaggctgatgggttgtactgtcggtcttgttgcgtgatccatagctgcaacctattctgccaaggtaggtctgcacgattgaagcgggcgactttgagccagactgacgctcaatcctctcgtcccatcgcatagtcatcggtactaaacggctccacatgtttcacccatcacaacactcgcacctctacatctctataaccccaccgcagaccaatacctcgcttatccctcaccccccttcgtcctcctcgctagaatgggcgcaataccccatgcttcgtcgggcgctagatgacactcggacgaaagcctgtgaggtaggcccaggggaatcggtcctgattcccgagggatggtatcactgcgtagagagcgtaggggaagagccggccgtctcggtgaatcattggttcaggtgaagggaaaggcgcagggcctcgatcccgagggatacactttccgacggcgatcgtcgggcgatgtgacactgtatgatacatcacggaatgaagggattgcatgatgataatcaatatcgacggggattgacaggaactctccttccgccccttgttaccatgtccgtgaaagctatggcgtgttgaagatgcgagatgacttcttccaggcgagagaaaatgtcaactcagggagttcagcgattgaatgttcctgtatctgagacgtagcaagctgtgctataatagcgtaaaagtgcgagctaaaaggttgggtgatatcaagcatggtgttgccgtgcgacaggaacggacaatagagatatccacacttttcccagataaagtcaatcacggtctcaaccagctaccaggtgatttccaaggtaaagaaggggatgatgctacgccttgctcagggtggcggtccttataggaaaattcgaagctctccaagaagaaaatggtattacggtcatagtcgcacaacgattgcaaacccttgggttgcataatcggtgcacttctcatcgattcacagaggcgagccgacgtcgtcttgcccgcgcttcgatagcattggggagcactcgtattgctgtcgaactttgatatatgcgagccacactgtgaacttccagagcaaatcgaatggtgatcgccgaacgtcctgttatatagttagctagctcgaaggggagtcttcgggaaaccgggcgtttactgtggcggtagaaagtgtcaaatatttgttctcgtgatgtcacgattctatgctctagaaaagaatcgcctcccccaggcgagtaccgtgagcgcagacgagaccggcggatgaagctctcaagtgactcggcggtctttacggcccacgggcaggaatagagcagtactcctgctgaaagaagaagaaggatcttttcgggcgtgtgatgtatccatacgacatcggtccaaaggtgatacagggaggaacggccgtcctaggctaaattttctgcttgtcacgagcgattgaatgtgtcggtcctatcgggtcggcgagatctgtacgatatggataaacggcagaccatcagtaggcgaagtgcagaaccacgcatcggtcgagtgctttaccatgatgacggcgtctcctcgtacgaaaagcatctccatgttccttgcgaccgactgatcgagaagtgaccccaccgcacgttaggcgagatgatcacaacgttgacgagatgactctgggcttactctgacgtttgatacggctccatcgtcaccgacgtctactagcgtgatcgtttcctcgacgtccgaaaggattaggttcatatgcgcatcatatgcctaagaggaggaaaaaagtgggtaagccatatcatcagactggatacgccttgcctcgcacagtagacctacgtgaagcactccctgcaccgtacgatctcctctcagcttgatgaataccctcctgtaagtcacagatacgattgtcagtcgcaaatcgtatagcgggtagagatgcatatggatcgcaagctaggtttcaaccgactcactcgcttagggacagcttgaccaggtccaaaggctcgttgacggtcgtggagacctcggcactatccatatctgcgctttcctgactgggctggagtacgacgtgggttttgggtgaagcttcctagctagtggagggtgaaatccgagctcatttcgtgtatggcatcgaggtcgttgtcgatagtaggaggtagatgagcgatgccgagagagagagagagagagggaaggaaggaagggacggaagcaaaaatggaacagagcttccgacttgagctaccacaaccacaccacatgcccatgatgatgcaccgctaagctacggagctacagctgtgcattgagctggtcatccaaacttcacgcaaaagccgcggccatgatatcctgagtgcattgcgggacaggaaaagatcctagctttcttccatagtcgttagctgttatagcggataaaaaacgcacggatggcttcctcagaactcgacatcaccgcgacattcgtggctactgggatcccgttggcacatctcctatcccccgacgaaactgaagtctctgcagcggaaactcttccgacagttctgtgcaactcagttcccgccagcagtgttttgaacgtcgcaattgctcataatatcacgtcaatggactacaagcggcttcgacatctgcatgaaccccttgtgcgagctgatccgattgcagtaggtcggtcgaattcgctccaggtctcaaccccttggtaaccgagctaaatcttcattcattcctctgtcggtagatgccgaagagacgataaggtatacgtgggtcgtatcgtcttccagatcaggcttacacgccaagctagcggatgaggatgatccgttcctgcgcgaatacggaggtcatcctattatcaaagaagcattgaaccgcacagagtttaggtgaatacgatgtaccagtcagttgcagacagagagaggtttctgaatctcatgggatacagatactgtcagactgtggaccaatgcctgttactgcttcaactactccatagctcacccagctcgatcgatgatcccggcgccgagctcgaagatcaaccgagacagacggaaaagatggcggaatatccgaccttgatcatcacacacgacctgcttcggctgtttcttgcggatcctcctgatgacaagggcgagcgcgagggggacatgaacatggatactgggaagcacaaggtcgagttgcgagaagggtgagcctgtctggcctttgttggaaccctctagtcgatgcctgaccccacggagacacagcgtgaccatagaagactacatgcaattgatggcgtgcctgcgctcaacggcgtcacaggtcaatccgaacaggtaagactttatgcctcggctagtaaggcttgccggctgacttgctgtggacgtctgataagcccgcctaagcttctggtccttgaaccttccttgccgactggggatctccacttcccagtcgccgttgcaaccagtcgaagtagtcggggcagaccgaccggccagaaaaaggatggaccaggtgtcaaggacgctttgaggtggcttttcggagaggaacaagtgtgggacgtcgaattatcagaggagtctagcgggtcatcaagagcttcgatcgagaaggatggggagaggagactgatcatccggaagaccgcgcaatcgatctgaaagaggcaccggtcggctttttctctcactttgagccttcccctctttgaggaaaggtcgaatgggaatctggtctaacaaatgatcggacggagaactggttcaatcattccattacggcatataaagctgcccgtgtgcgaagtaggctttccttgatagcacagacaatatacgtcagacggccttctcggctctgatctctggaagatccattgcatggtaccggtttaccaacatagtatcgcaaagattgtatccctatatttgatcgatacgctacgcaacgctgccctctttgctctcgtacgcttgcgagtggtatcgaatcactgtcaaatatcttggctgcaatgttttctcttggcatttgttgagcgtctcgcccactctgagaatctcccttggacgacgactctaatcgacaagataacgctggaattggtggtgtagattgatagggcattcgttttggctaagggtagttcccggccgatcgccaggttgacgcacggtccctcgtcatcttcagtgttcatagcctcggtcccgaattcaacacttttttcgacctcaataacaagatcaactcagtatgaatcatatcgtactgaaggatgtgagactgaagaattaggggggccataccatcgagatctaatgttcatagcagagcgtaactgggaaatgattggccgctccgtctgcgcttgcctgaagtaacctaggactacgtggctgacatgatcccctcatatccggcgagtccgctttaccagctcagacttcagcgattcgagcaatcgtggcagctacgtgttcaagaactcttacagagtgctcaccggtttcaaaccgcagcgaccatatcttgactgtcaatcaggacccttctgcgcttttgatcacgtggcggttatcttacgcgtgtaagcgagctcgccaatcaaccggtccggtcgcaccgattgcgcactgttccctcgcttgtacctggcccgacttctacttctggcttccaatgaaacgccgagcgtgagaccggcgtgtccacctcagggcaaagagaattggccgagcttgcttccacctggccagatcccatatcctacgacgtcatgttcatttgtcacactccgaatgtgttcgccagtattccccagacccagcgcttaaggagacgcgcggaaaccgagaggaggcgtggagacgcgcagcaatcacgataagaccgctaggcgcggggatgggggggggggccccccctcacttgcgctcgcaccctgtctcgattacggcaaccaccggatcagacgagactcagcatcagcagcacttgatcatcatatcaacctactacagttaggtagcaactgactcagctactcgcgaattcgaaaccaccgatcacatccatctgacattctatcaacacacgtactctagtaaaatacttcaaactcgtcctcttatctccccgaactaagcaaaccgaaaacacctgcccaaaatggtcatgctcaccagtcagtacttcttcggttgaaccctttgacctcgccaatcaccctttctgatcttgaacctcccgctcgcatcttccacagcttcggacaacgagacgtacaatgtcgacaaggaggtggctgtcaggagtgttctgatcgccaacatgatggagggtcagtatccgcatactgcccgctagaccgactcgggaagaaggggcgagagaagctgattataccacactcgtctcgttcctcctcgctgtccttgggaacctacctttatttacaaatctttaccggatcaccgtctacatccatcggtgctacccaccatatccccttgctcaccaatgggcttcacgccgcaatccggccggtaccacatgctggatgcttctcgctcgataatcgttggatatccagatatcggcgatgtcaacgcccccatcccgcttcccaacgtcactagcaacgtcctcaaaaaggtcagtcctgcccctctccccgaccttccttgcctcccctctgccctcccgtggaacttgcccccggactcgccctaacccttcatctctctccttgcaggtcctcgaatactgcgattaccacaaatccgaccccctccccgtcgcctcggacccttccgccgacgtggccgaggaagcgaggaggaggacctctgaagtcggagaatgggacgccaagtttattcaggtcgatcaggagatgttgttcgagatcatcttggcggcgaattacttggatatcaagcctttgctgtgagtttgccctcgcccccccccctaacatgtggcccgagctccagactggcgacgagactgacgatggggcaacgtgtacggcgacagtgacttggggtgcaggacggtggccacgatgatcaaggggaaatcgccagaagagatccgaaagttgttccacatcaagaacgatttcacccccgaggaggaggctcagatcaggagggagaacgaatgggccgaagagtgagtgtaccaccggtcgacggtgacaatgtcggtgtggatcgtggtgaatgcgagactgattacttcctcgttcgggggttcatagccgttaatctagggatcgaatgcgatttcatcgaatcgacgccgccaaccaccctcgtcttcttactcatgataatttacgtcaattccctcgaactatccctcatttcgtgtaacccttcgtttcctcggctaagaagccacttcttaccaaaaccctccaaactcctcgctcgtccaaacgcttgcatatcggacacgagagaagggtcacgtgtctgccgtttcggtccatgctttattataaattatgtattcctgctcccaagagatttgacgcttcgattacgacgctacaggtgggactgagaccgaccaggggaacgagtcggacgcggtcctcgcagcaccctgctttgtccgatggattcgggagtcgcgcggtgtcactcgtcctgtctttctgcctctaccgtcttgcactgcgagtactgcacaatggagcgaagattgttgtcggcgccagatggcaatgatcatccggcagtgtagttcaggctgtgtgtttgccttctctggatgtaggcatcctgctctcctcgctctggtgacataaagcaaggcgcgggaacctttgtggccacgcttcgttatgtgatacattactgacgacatctcatcgacgtcacgagccagccttgggcgctgtgtacgagtcaagtaggaaagggggtttcatgaaagggaggcaatgtctcaaggacacaaaaatcaggctcagctcggcacgcaatgcagtaccggcctctagcatgatcactactatatacatatatacatttatatgaaggccccccaaccggtcgcatacgatcagagatcgacatatgtggcgcttcaacgctcaaaaacaaggacttcggcagcgcatcacctatcggtccgcaattcgaggcaaggcaataggcttcgatctttaacgatgaatccttttcgagacaacagtttccaacggggagaatgggaagacctttacagtactgagaccgcagagaccgcatatcctgacactggaacaaccgggctgcaatccaatctgggtacgagctgctcagccacggccggtataccagctgctgaagcagtattttcattttcgccttagagactttcttttcgttgactggcgagcaattctcagacacgaccaaacaaggtgagccgaatggcttcacatccgggtatgataattaaacgtgaaaatggacgttgacttgtctctcttcgacaaaggcgtctcgggccgacaatttggtgcgttaagccacattctcttcgatccagatcactagcgcaacatgcgaacaggatcgaggctcacgtgcacctttgaatccagtcagttccggacggactttagaaggcagcccgagtgttaccggggccagtgtagtatctgctcagcctttcacgagaggaggagctagtcggaggggatcatccgtagcaaaacggaaggcgtctcaggctcaggtcgacgttcagaataagcggatgcggaaaatcaaggtaatagatggcaaattgcaaccactcacaagggaacagaccgaagccaagatcctcaaagacatcacagacccgaagagagcccacctgaaagatcaacccggctacaaccgctgtgacacttgcgctgaaaacatgtgggaccctcccgatatgcacacttacggggtgccgggcatcgactgcactgctgtcgttcacctcatgcatcaaaacattgcccggaaatatctagctggatgccttgtgaaaggaggatattccaagcatacagaggtcgaagattggcatctatgggctcatcgccaggggcacgagctgaatgcgctgcaggaggaaaaatacgtgacggagtttcgatcatggatagaaggcgggttggaggggacttggccttacggagatggaatcgcgaagcaaggtttatcagaatccgaaagtgagactatttagtatttgtaagctaccgctattctggatcataactcttttatcttgagcgtcttaggccttgacatcatgacggaatcccattcgaagactcctgattgcgcaagacccctattcagactgtgttgctaatcaacaatcaacccaattatttgaaacacatatattgatgagacccttaccattttaagcggcgcatccgcaagtgtcgagtgcgaggggcctttgccaataaagtgagtctgaccccgctcgtcgcggatcgtcacttccggctgcactatatttgtgggcctactagaattccattcgcgctacagctcttggaatggtctctgaagccactggccacggaaagtttcatttgatgagagcagccgtctcagcgagaccctagcctggacgtttcagcgcgacttgctttgattccgcatacggcttggatctcctacaccattctcttcatgaaagcggtcgtacacagacgattgctggatctcattctgcgaaatctacgtccgtttcatctcgaaaccaaaagcccggacgagaggagtacaaagctcgaagacggcttcgcaaaccgagccaaaggtccaagtcgttggagtgtttcggcaacgagataatctgggaggtcggaaatacaatgaatgcggttcttgtcacgacagcatctggagtccatacgatgggaatgggagttgcagcaacccattccgcctcaagtaccaagaggtggctcgagatattgtgggcgggaacgttgcggcatagggtcatgggtctcaagctgtgtaccagggatgacgcctggaggcatacatgcatggtcaagaacgggaacgacgcgacatcaatttcgtcaagaaggggttttgaggagtggaaaagtgacaaggtggcgaagctcgcaaggacgctgcatgtacaacctattacccttgaaacttagttgaggacgcccgaatagaaagtactcgagtaataataggccatgcgaagaccgagcgatattgtatcctggtctccgatgaccggtattggatctgtccggatgaccgaaatctatgatattcggtaactcagacgtggacctggaatgatgaccataagttatagcgcaaccaagtctcgaaggatatccgtcacatgatttgatcaacgcgatcctgatcagagctgcagaggcgcgctcgcttatgtgccggacatcgtgatcatataaaggtgacgtatcctatcgttcctttgttacctacttagccggctttacaggccaatttctagtacctaatcttgtacaatagctcaacctgatcctgataattcaatcgtctttaccgaatacagaccgcatacgcatccgtacttgcctgctctcattcgcattgccctctaacattgtcatgcatgacatcgacaacgctgagcatatgaaatcgccagacacgaatgagagtttagcgcctttgcccggctcggaggtgccatttgtggacgacaattttacgcatgaattagaccaggggcagtcttatttcgaaaacgatcctttctggagtttcactgggcaacaggcagaagcaagtgcagttgccggtgatgaatggacatcaaaagatgaaatcggacccgtattacctcctgattctcgattgttcaccaaagcatcatcttcttgcggcacgtcaaacagtctagcagactcgagaggcccagcattgggcccctctgccccgaaattgattgatgtttatggtgagcgcagtgcatcctctgccttggtcgaccttggagcccaacccctcgcagctgaaagagcgcacaaagactccggacaagtcacccaaacccttgagagtcatcggaagaagcaagcgcaatcgattgcgatggaaagatgcatgcgcttctcaaccagtttcggtgtcgagacgacttacgatcacggacccgaaaccagtgcgaaagctgcaagaagaacatgtggcaatctctctttgacggtcaaaagtgcgaagacgagctgcatagcttacatcaaagggtagctgaacttcatatcgggcaaaagctgaaggatgggggttacgatccgagttccgaggttgaaggtcatcatatctatgcatggatccgcggacgagaaatatcgcgacgcggcgaaaaggaagctgttcgtctatttaaactttggaaaatcaattgcaagaacgcattgtcacaaaactctagatgacattcgctctcaaacagcctttgcgaaccgattgtagagatgtgcatgtatcgtctatagatctgcggcctagaagcacggtgtgtggctcgccgagccaatcgctaccgaaccaatcgctgggaatttagacgctcgtatcagggcgtaacatgctttgcaaggcgagatctttgttgcgtctgagacagtcgagaccatcatgcaatgtaatgtggcgcgtcgtcaactaaggaaggcggttgcttcagggagtcccacgttggtagcggtatgctcgtttactctctgagaacgtggaaagtcaacgacctgtgttcttccccactcagctattcaggccgtcaaatagcgtctcattccttatggtcggcttgcactgttggtgcttgccttctcggtccttttcgataagtagcatgatcctacggggtggcgagggaaccggccccgcaatctcgtgtaaatcggctccgtccgataacatcccggattgtgatgcaccactgcagagcgactgaatgggctatatccagatgttccgatcgctactctggtaaagtaggcaggtttgaggatatgttttcccgccggaaaccttgtacccagagagcttcagcggggttcaagatcctggcaagacaaatcgatttgtaacgactcaggggtctcgagatccatttgagtagactagtcttcccccagagcgcccaaggtaaacccgccgataggacgctttcctcgagagactcttcgtccgcgccatgtgactggatagtccctcggcgatccctgcatcggtaagctgattgtgaacaagagccgacacttctgaacccacgtcttgcaacagaggatcggtgaagaattccgtgccattcacgcttgtccggattgcagtgagccgatgtgatatgttctgctcgtatgcacgtcaaataccatgaagtcgcagccgaggttgtcggcaaactgccaagccgagtggaacggccgcaggatgtccacgcgctcgtgtgacggcaagtcgagcgcatcctcgcgctgtatagctttgatcgctaaatcatgaaatcgggtccagaggcgacaccatcagatgaccaagcggagcccaggttcagatccagcgtgagagggcgagaaggcgagaacgacggcgatggctgcatttgactccaatagtgcctcttgatgaatgaacagcagaggtatcgaagcgggaccatcctgagcgaggaaactacgcctgtcgatagaccgtgtgcactgcacgctaggtcaccgatcatccacggtggtgaaagcagtttacagcaccactgtcgatcggtttcacgttacaagcgcgcgagagaccttgtcgactagggacgaccatgtggagacccaccacaggccactcccctgatgatgaccgccgtcaccggtcgtctcagaccgcccagtctacccggtgactgccgagcgacaacacaatcgacgctgcgtaacccgaatccgcttctcccacctgatggactacccttcaatcaccagccgcgcgagtcgaaacgcgcactcgtgcactgtggtgaaggctcgacgcgaggacaaggagatgacgacccttaccatcttccgctcgacttttcgtgtacgaactggtcacgaaacgacacaccaaacgcagactgcaacgataacgatggacgacacgtgcacaagaataccaaaagggagggcccggaatatattccatctcgagtgaatcccacgagattatcatcaaattctagtctagtcaacccaacccgaacccgttgtctcatcgacccatccgtacgccctttaatccgcgcgccaaggagatccaggcgagtgggtgtagagaaagcggtaagcaatgagagagaaacgtcgagtgggcgagtggggagggcgggtccaaggcgggatgagaatggtcttccgggggttctccttcttttgtataagggttggagggcgaggggaacgagacgagcgggaaagtgagggtaggatttgcgcgaaatgtttagtcgaacagtccgaatcccatgtcgtcgtcggactctattaggtcgcgaagaaaaaaagcaaacatcgtcgtcgtcagcaaaccgtcccgatgaaaacttcttctcgccttcctctgttccccctctgttgtcgacgactcaccctccttggcctcctccttcttctcctcggcagcgggctcggcggaaccagcagcggcaccaccagcggcagcggcaccgggtccagcggcggcgggggcaccaccaccggctccgatgttggagagcatcgacttgacgtccttgccctcgagggccttggcgaggagggaagcccagatgggctcaacctcgaccgaggcggacgaggtgatggcgacgatcttgtcggcctgcgcgcacggggtgggggaatcgcggtaagtggtcgtcgtcctcggtgtcgcacatggtgccctatggcaaggtattccggggcgggactcacggtgatttcgacaccctcgtcggccaagatcaaggcggcgtaagtagcagcaagctcagcagtgttagactgtcatgaacggcgaggtcgaggttagtcttgcatggtcggaactgcggctcaaggcagggttcagggttcaggttcagggttcggccggcagaggtgatacgaggagtacgggagaaagcgtgtggtttcggttcgaggtgactggcatgtcatgtcgtcgtccgttgttcgtcgtcaacgaatcgcccgttcgacgattcggctctgctgactctggacgacgagatcatgctgtctccctcgacctcgttgtccatcttgacgaaagatccgcacgcccatctttccgtatccatccgaacttcctcgtcctgaaaccgaccgaatctcctgcctatgcctgcctgcctcggtgcgagcgggtcgtaagcttaccatcttgaaaaaagagtttttccggaggtctaagaacgagtctacgggtgttgtcttgagagggaaaagggggagaaagagtaggtgcgattcgacttgcggtgatttgaagggggtcgagtgagaggttgatcgatggggagtgggcgagtacgggaccggtgaggtgaggtgaggtgaggtgaggtgaggtgaggtgaggtgggaggagagtgacgagtgagggcagagagacgagagagaggcaggggagcgaagaggagggagaaggaattgacggagaatcacgtgactctacaacaatcccaagatcgtgcgcgcgcgtctcaggcaggtggcctaggtggggattggggcgcgcgtgagagatcggattccaatcaaaagcgcgttcccgtcagctccagctcgagctctgcgcttgcataagtccgagcttgaagggggagagacggctgaagcttttgcgattgagctgagacttggagtaccaatcatcgcaatcacccttccttgccccggactcacacgctcactctctcagtcagtcactctctctcacacacacacacactcagactccgaccaccaccaccaccaccaccatcgaacctctggacctcgggtctgtcattgtcaactcgttcgaatcgaattcaataccatacacttatcatatcgctcacacctgctcttctcgccctcttcgtactccaccaccaccaaaagaagaagcgtcattcatcctcgaaaaatggccgtctctaccaccacccccaccgccgaacaggtcgccgtcccagagaccttgttgaagaagaggaggtcgaccgaaaagtcgagggaggaaaagttggcaaaggccgctgaagcccagaaggtaagtcgcgaagcgaccgagcgcagcgagactacgtctccgaaggagactccccagcgagactttgtctcctctcttcttcttccgagcgcagcgagtaaccgcgagcgtcagcgagcagatgcctttgtcgagccccagcgagacttcgtctctgctcttccgagcggagcgagtagccgcgagcggcagcgagaagatgccttcctgtctcctgtgtctcttgcgagcagagcgagcagaacgagttctgcctcggggcgagctctgcgagcatcatcaaatcgacctcgtcgacgcgagccccccgggcgagcatgatcatcaacgctcttgtctctcgcgtgcgagccccttaggggcgagcataatctcgtcgagcaacgcgaggacactattgacggcgagccaccggcgagcacaatcaaactgcgagcccatggcgagcatagatcataccgtcaggaggcgagaagggtcgaatctttttcttttcgaaaagaaaagggaaaattttcgaccttttttgatcaatcacgcacccattcgccaccgccatgatccatccaccttcccattcccactctcgacctcgacctcgacgcacacgctcgaattgaaacaggatgatgcaaaaaatcgggccaacactcttgagcctcggatcggctagtcatcgtgtaccctggtaaaagggggaggaagacgatgatgcctgttatagttaaccatctttcgggactgactgtttcaatacacccacgtcgtcgtcgtcgtcgtcgagcgagcgagtctagcgtctgccttttctgtcgaccacgcactgactctcttttccttgattccggcccgacgcagaagcgacaggcccagcgcaaggtcatcttcaagcgtgccgaccagtacgtcaaggagtaccgaaacaaggagagggaggagatcaggttgaagagggaggccaggaagaccggtgacttttacgtccctgccgagagcaaggtctactttgtcatcaggatcaaggggtgagtcttgcccgtcgtcgtcgcatgtcgtcctcgccaatgggcccggactgacccgtcgcccgtgtccgaccgcagtatctccaagatcgcccccaagccccgaaagatcctccagctcttgcgattgctccagatcaacaacggagtctttgtcagggttaccaaggctacccagcagatgcttcgtctcgtcgaaccatacatcacctacgggtgagtagtcgttcggtccgaaaaccccactctctcacgagaggcgcgggcgagtagggcagagagctgattacatcccccccctccccctccgatagtgagcccaacctcaaggccgtcaaggaactcgtctacaagcgaggttacgccaagatcgccggacagaggatccctctccacgacaactcggtcattgaaaaggccttgggcaagcacggactcgtctgtgtcgaggatttggttcacgagttgatcacctgcggacccaacttcaaggccgccaccaccttcctttaccccttcaagctctccaaccccaacggcaagtctaggtcgtgcaagcgcatgtccgtcgtgacactcagctgatgtgttttgttcgcgtgtctttttttaattggcgcaccacaggtggatgggccgaccgaaagttcaccaacttcgtcgagggcggtgacgccggtaaccgaggcgagaacatctctgctctcctccaccgaatggtttaatcgccatttgcccccaaccccatcttttatatagtccaccaccccaccccccacgagcactttttttttcttcctacttggtagacctcgggttgtagagacatgtcgtcgagatgatcctgtcgtgtaatgtcgcttgctttgatgacacgaggtttcgccctttggaccattctcgctagtcgtcgttgtcgccgccggttgcacggatgggcaagttcagaacgagaacgtgaatgttcgtcaggttgggctcgagctctagggtatcacaggaacgcctcgggtgccatcactttctgtctccagaaacggctcgcaacgagaccgcctcgctgattaatcatgtgcaaaccctgactggtcgtcctggtcaatgttggatcagccggccggccatatgggggttcagctcgacatcgccgtcgtagaaaacgcgcggtgctcgtactcgcctgccgctgtttcacaacgcgcctcgtcgcgtaggccttcggttacctctctcctaatcgtggaagtctcttcgacgtccaatcccataatcgagattgctctgcacgcacgcctgctataaacatgttcacagcagctatcgtattaaagacccctgctgccagaaccactattacccaaccaggctcgaccgcctgcgccgctgccgctgccactcccatttatcaagacgccttctggtcctaatgacgcggctccgtgaaacaataatgtgtcgcgcatcatacgcgcgaaccgccgctccggccccatcctgctccccttgatgcaggtctatgaaacgtctggaccaatatgcagcgtcagtttcaaggccattccttctggacttcaaatgatcgaattcgcgacagtattgccgctgtgatgaaccggattttcattggctggcgtgttcttccagtgacggcattgacagcaggtcagggattctgcgtcaaaagggaagagcgcttggggttaggggtttggctgtaaccaatagagggtcaagagagtacgacgcattccgttggagcaattgcatgtcgagatcgcgaacgccgtaaagttcgccgcgttcgggccttgaaggtcggaacggacgccttctatgattatcaagtcatgcaagtcaatccagcgaatccacgaactgcattcgatcaagccgcgcttcacctcttcctctccgactgcctgtcgtaagctcaactttctctagcaaccgagaaagagctgatcctgctcaaataccgcttaaggtcggggccaaagaagaggcatcaagaaccggcggacgctaacgggtgcggagatacaagggacgagcacagtctgagactagaaatgagtaaatctcgagatcatgacaagggcgattacaagccaacctatgacgtcctctccggcaattttgccaggtaaaatgagcccaggtaggctacagcggaagtgaaggacgtctcgtcgccgcacttaataccatcgattcgtagttgatcgcgtccagtccgctaagagtcgaatctggaacttctaactcggaatatcaggctgccctccacgtatgcgaattgatttccatgctcggctggtatctatagccatctgtgctttggcgttttccacaacattccagactgacaccgacaggtctcgatgtgccaaatcgacaagatcgttcataatcttgtcacaaggacgaccaacggtcaatgtgtttttttcttctgttcctttccgcgaggcgaaaggcatccacgaactgaaccggtatcacacaacggcatcatattggtaggtgtcatgtggatgaaaagacatccgttatgagagctatttgagacacactagatagccttttgcactagtggacacgtgctggtacatagcaaggctcaagctgaaccgaaggaccgctttgcaaggcctcagagcgccgcaatgcctttgctattgccaaaactactatacaacttccaaaactcgtcgtccaacgatggtctgtacaagcaggcgcagaagtacacgatacctattcttcttgacccgcgacaggtcgtcggcgcagcctcacgttcgatacctctcgactggtttgcgtcgtccctttggactgtgcgagcacgatctcctcggtagttgcgacctgctcaaccccgtaagtttcatctgcctgttcgaaagccttgacaatttcgtcctcgtcctcgtcctcgttcgctgcctcgaccacgagctttggctccgctttgtcgccctcgccgagccgctcgaccgcttcgcgagctctctcgacacgtttggcttgcgagacatataaccagatctctgcaaacgcgacgatcaacgccgccaagagcgccagaaggatcgcctaggtcgtgatgacgacgtccgaatgctcatcagcttccgaggtctctccgacgtaggacaccatctcaccttctcaggtctcaaccctgccgagctcttggctactacaaagacggctcctccgacaccacccacggagaatagtacattggccgccgcagccaattcctttcggatcgagcggtattcctggccgaacgacgaattcgcctgcttgtttgcttcgtgaaggtgggaaggcaaaaagttgtgattctgagaaggagcatctagcctcagcaacccgatagccttgcgtcaccgccagtcgagcgtaccaaatcagggtttgcagcgatcagacgttcttgagctcgcgaggtccgggtcttcgtgccggatagaagggaaatgaggtggtagtcatacggatctatgcgcagaagaacgtcaatacgcgcaagctgataattctcgatcagccgatgaccgactcacctaaagcgtggcggtccagcgatgcggagccctgttttgagcgggcccatttggcaatatccgaaagggcctgtctgctaatatattctcctccgtctgccttacctgcatcattggggtcgtgaatgtcgttattttggtcatcattgtcattatctcctgtcgtgtctttctgtcccatatcatatccttcaacggcttgtaggctggactgtatcgtcgcacgcaatccttccggcagatcgtcacacttcaacagtccttgtagtgcacttcgcaaatgtggtggtattgagagatcaaggtcgggcgctatagattggatgggtcgatttgagatcaaccgagctgaccggaggctcggagaccggccgcttactccttactggctgaagctcgatccggaagcgcaggagggatccgtctcgaatcacctgcattggatgggagactaggtacgaatttcggcgcagcgttgccattggacgctgccgatcgcgctgcgttcagcagaccgctggcctgcgagccgatgttcgtcctggccatcttgtccgagagggtcgaaaaattggaggccaggctggatacactcgattggcgcgttgctgagctcgaagggaatcgaggaaacgccggtgtatccgggtatcccgcagtcgcattgactgttgtcgaggtcgacatctgccgacggggaggcgggaggattgctccaggagcaacttgtgtcggtgaccgttgcggcggaggagtcggctttgctggcttcaaagacgctacacggacgtagtcgtcttcagtgctagtcgagaccaaggacgatgatgatggtacacgttctgcagacatatcggaacgccccgtaagcatcacgagggaatgatatggccacaatctcacactcacgttgcgattgcagcgtcgatggctttggcgggcgcggtgggggaccagctaggtatctcgccaatatcagctcaacgctgtagaaccatcctcatgacccttaccttttgttggcgagggcgccgattcgaatgaaatcaggtcggactccgcggtagtctttttggtcctgtccggaattactgggggaggacgttttgccattggtggagggggcttggcaatggatgtaagtcgaggttccatagttttacgtcctgttgtagtgttcagttcatctacgaccttttgctttttaatctcgtcgacgacatggactgtcagtccgaatatggcgtagactggccgatgatcagatgttttgatgtttgccgtcgtgtagcttttattatcaagctgtagcagcgcaggcctcgattaggaaaccgagtattgttaccagaagtggcaaacttaccagtttcccctgccacagaattcgatctgcaagtggagggtcatcagcgatcgcacgtggagacgcgatccgaataccaacctgtccaagcaggtatccgctgcttctcgctcgtgtcataatcatcggtcccgacatcgctggcgtaaaagacctgtttagcctttcatcttgctatatcgtttgacactaggactgactacttgtaagtcggcctggtgaaacggaagccacgtgtcaacaaggttgtccggcatcgtttacatttgttcggataactcacgcaaaggctatctgggcctcattgtatccgacgaaagcttctcggtgaaccattgctaagcggagctgatcagcctcccaaagcagctgaacgtcgccctccgccactgctgtccggacttcttcattggtcaaattgagccgatagttctagcggaatataagatgcaatgagaaccacgcgagtcaacttgtttttcatacgtaacattactcacgcaatcggcggcccaaatgatcacgctggtataatagagtatttaagctatcacagcccaactcgcgagcgataacttgacacgtactcatgatcggcgatcgtcctccctctctggaaggccaagccatttgcaatcgtgtgataatccgcgtctcgttccgtgacattcgtgtgaccggcagccaaatggcaggtcatgagacatatgggcgtgtcgtgcaaatccagacggataccgcagccccctttgttcccagacatgccacgtagacccgtctgtcgccatggtgcagtcagcatggagggctaacctcgcgtgctaccccgatgaaacccaccttcttcgaggcgccttcaactctggtgatggatggcagtaggcctgccttgacatagacaaagatagcagtgccaaccagctgctcgcttcgcaagagtacatatgcgtctttccctaaattctgttcaaacactgcggacagaatcgcttcgcatttacgcctgaagaaatggtacacgcgtcagcattgcgccctgctctggtcggggtgacgtgcatgctgacctagctgcgggatcagtctgcaatatttgctgagcgttgagaggcactagctcctggaaggcgatggagtaaaggtcatatctgttacaactgagagtaagcattgactctagatgccacctctagtcgcagctgaagctgtcttacgatttatggcctacagcacagcagaggagattgattgctcagccagtgcctatcaggctctgatgttcctccaactcaccctctgggaacagccagtcctcgagatctccgttcaagggtcgaccacacaggttccatgttccagtgaaaatcgagatcttcctggggctcgagtattccagcagtcttgaagtcaaagcagcctgtatcgagtcggagatggggtcgtaaactcggacgggcttttgcccagccatgataccctggatttagaagcactttttagcaagtgatgagtacctccttatccccgatggagacacaccaggaacagttcgatggaagcctgtttgtctgaatcgttaaaggtggcctgaatcgctcgaccgacgctcttgctagcatcgctgatgagactggcaaagcttcgtttaccactgcgagtcacgctggtattgagtgccccagtacctgcgtagatcttggaaagcgcatccccgttgtctgcccagagtccccgatgggcggataggatgatcgcggaggccgagtaagccgatgtcgacgagtgaccgagcgaggcaagaaagctcgatatcgtcaaggaagagaagacgtcctcgacatagtttgttcgatcgaggctgcgggtagggagattgcaatcaaccgtcaaagccccagatgtgcgagactgatggcgcctacttaccagtccaggcactttggaaccgcagtgagaatcctgatcagcacccgtcgaccgtcctccagccgccccgtctctcaaactcacgttgactcggaaaaccccggattgacgcatgaccacatctccagacgctcgatcgatgacgttccacccgtacttttccctggcgttcctcacgctaacgatccgtttgccgaaatcctccttgacgacatcatgcccgctgaccctgaccatcgcgtgaaagtcgtacggtgtcaagctgaccaaggtttcttgctccccggtcatcgaattgacagtccggtctgacgatcgcaaggtggtggagagcgaggcgacgtgtgcgttgtaaatatccgagaggatcgtctcgttttctccttgacccaacaggttgatacagtggacagacccgtaatgatcgatcaagtccaaaaagtgcttgtcaaacgccggctggctggctgcctgaggtcgagtgatctgaagtttctgaccaaacgtctggtttccgacttgttcccaaaagaggggcacgcttcctctgacttgaaggaaactcatcacgacgtcgtccatggcgaggatggtctcggtttcgacaaagttggcgacattgccatcgtcatcgacacctcgggttcggaatctcgctccggcacgtttccatccgagccgacttatcagagcgagactcgtctgttgttgctgattcccgggtaggcgcgtgggtgatagggtgacggcgccggcgaaaccttgtatcagggggacgagaaagtttgcgtcgtccaggtgagctcgctgagcgggcaagagggattgtcggaaatgcaacagaggctggagtatattttggttccaaactatgattggtgaggcaaaagtaccgtcagtcccgccgtaccttttgctgagtagtcccgcgacgcaccgaatcgctcatccatatcgtctagacaacccgcgcctttctctccatccacctcccgcttgatccgtttccaatcccaactcctcagactcttgctcatatcccaatccccgttggtagaaaagtagaacgtccccgttgacaagatcttcttgatcccctcggccggatttatgggcacggtggcttgagcataaggatcccgtggggttccattcacgctcgagctgtttgaggaagcaaaagctgattggtaatacccatcatcttcgaaggcttcttccccaggcagaggtgcaagagggatttgagatgggtcatcccacagggcagaggtaaggcagtggaattccaccgagaggacttttgagggcgtgaggtgtgtctgggggatgatgggtgggagcacaagggaggatgagatgaggacgaggaagatttcagagttgccgttcgtatctgataggaccatgcgagacgtaagacgtgatggctatagtctcgagcagagaatcgtgactggcttaccggtaggtaggctgatcagacccaatagaccgccgatggaacgcccggcgttcaccttgatcaggcctcgctcgtccacatcatccaagctgagcaattccacgatagcagagctgccgtcttttcctgctgctcctcgccgaaaggtattctcatcgagcgcctgctcttgttcatcctgttcgggctgcttgaagaggagcgcgtgtgtcgaggaaaagaggtagaatgtccgtgggtacgggcgaaggtatagctggaacgacattgcgtcccggtacgaggagggctgagtcgattatctatgagatatgagtggactcggatgacggattctatagattacggctgatttgcgaagttgtgatgatgttgcaacatcagagtaggtggaggaacaatatgggacgtatgatccgggtcgacgatatccctaactcgctatggcgatgacgcagcatcgagaccgagaaaaacgcataaatttacttccgaagagtgaatgctcgtgaaaacgcatgatatcaatgcttccgagtttacctactaaatagtcccggtgccatcactttacggcagcatttccatttgaacggggaaacgagagagctcgagctcacacgtcaaaccgcccacaatgctcatcaacgtttcctgtatgtcctctcacacatcgctaaaacctatctaatagttaatagtgatccagtgatcattgaagggaacatcactctaacgaagaatacggactcggatacgaacgaaaacagaaagaaaacggcaaagagacgttcgcaacgacattcaacctttgacgaccatcgcctcgctcatctccccttctcgacatcgcgtgagctcatcagctcacatcctgcgtgtcgctttgacacgagagctggactttcataacgatctacaccctcgaagcactaccggtatacgaaacaaacacggactcgtaacgtcatccaaattcgcggctctcggctacttgttacctcgacctgttgagctcgatccgggtctcatcggatcaatacgatcgtcggcgtcctttgcgacgagcaaatgtccagtttcttaaactcgatcgggtaagtctcggcacgtttcgttccgtatcttcctttggccaaggacggatccggttcaaatgggatgaagtatgctcatcattatcgcatcttcctatccctgtcaatatctccgcacgatcatccggacctttcagccgcctccgagccccgaaacgatcccctacgaccccagaagaccccgctacttccgatcccgagatgtcacaacccgcttcctcccaactcccacctactccgacgggtccggtcgaggagaaaccattgtacctctgccagccgttcgtcaaggccgctctcgtcaaggggagtttcaagaccatcgtcgctcctcccaagtatgtggacgtcaacgaatgggtcgctatcaacagtgagtcgggcgtcgtccgaaagtgggtcgagctggtccgcacgatgagctaatgcaagagggtggtagtctttgatttctaccaaaacttgaaccatttctacgacgtcgtctccgaattctgtaccgtccagacgtgcagcaagatgggagccgccaaagagtcagtagaaatcggtcgtactcctgacgatgccggaaacgtaatttagcacgcaaactgacccgcgggggatatttgtgcgacaggttgaactttacctggccggatcagaacaaacgaccggtctcgctcccagctcctacgtatatcgattacgtgatgagttgggtccagagactaatcgatgacgagggcgtctttcctaccaagagtggtgagtctaccggctggtcgtccatcccggcaatcccgatccaggttgctaacccccactctgttaccatcgacgttcccgcccctcgaaaggccgagactttgcgccctcgttccccagcacggcgaaacacatttacaaacaactcttccgcatctttgcccacatctatcacgcccatttcaccgacatccttcacctctcgctcgaggcgcactggaactcgctctttgcccactatgtcgcttttggtaaagagtacgatctgctggacgctgtcgatctcaaggacttgagaaagggaggagggggcgtggctctgctctgcgacaaatggggtgaaatgggtaccctagaaggttgaacgaggggagaggtgggggaggggacaggggacgagctctcgttggtatttcctgtatcgtacggtttttggtctggtgattcgaatccatgtatatcactcggacggcgtcaagctggacgtagcaggggtctgacagtccatcatcccgttacgtatgagaacgcaggcggtaagactccacactcgcaacttggtacacatcagggttggttcgttccgaggaaaactaaccgcccagtttgtcatgagagggagaggataggtagctcgatgaacaaaaggaatgtactgtgcccacctaatataccatcaccattactggatactctactctgattctgatttgttttgtttgtttcgtcttgtttccaccttttgttcgatgatgatggaaacgcggaaacgggcaaccccggctggtcatcgatcagcaattcagcagtcaccactactactatacctgttttgatctcgttgggatcagtaggtactctcttttagctctcatctggtagtgaaagatccaagtctataacacgagccttgccgttcaccaatggcaaagccgacaacgtccgggggatttcatacctgacctttgatcgagcagggctgcatgacatcagcaggcagagacgatcggatcaatcggttcaagcgatgtctgggtatagcaaggtcgctatcgctgtgggtctgatcgccatcctgatcggagctaccagggctctaccgttttggttgaccctcctcttgacgcccatctggctagctgctctgggactcgggatcctggccatcagcgttggggcgagatggtggtatgacgaaacgctggccaagcatgatgatcggcgacaagctcggcgcagacggaaaaggcccagtatcaggtggaacgccagcgttcatgatacggacgtctccgtaggctatgttgccgatgatgatggccggacgaccaaggcgttactgcgcaacgtattgcgcctgatccatcaagactttatctcgccttggtactcgcgaatatcatcctcacctacatttcccaacgctttggacaagaccatcttgtactcggtcgagcggttagaggacaggttcgcaaagctggacgtcccccaactactggtcgccaagatcctgccgcacatgacgtctcacatgcaggcgtaccgtcaggtcgaaccttttctctatccttcgacccggacgacctctacacaggcaacagtggatccggctccgatcttacagtcgcatagaaagacccctctgcatcccgctttgcccgcacctgcgctggcgaatccgatcccgagcgtggaatctcacctcaagcgcaaggtggagcaactgctcagagtcgtactaccccccgaagagagggaaagcgagaccgtcatgatcatcgcgagagaggtggtgacctgcgcgatcgccatgccgttagtggaaatgcttgcagacccagacttctggaacagactgctggatcaacaggcggataggcatatgcaggagaggtgagacgccgggatgaggaacaacagcgattagcggtcgtggctgatcatagcggaaccgtttgcgggcgtttcaggcaacaagtcaaccagcttcgagcggctttggaaagcgccgcttcgcagccgagcgctacgattcgtcaacggtcttcaatgcccgtcatggcttcgacggacggtgcatcttcagtcaccaccccgagagcgaccagagccaggcagtcggcatccatctctatgaacacggacactcggtcttttgacgtctttctcaagagtatcagcaagatccagaacgtcaccgaggcaaagaggttgaggaacgatgtcgaacgagagatccggcaggtacaggcgaggttgtcgatagaaccgaccagggaaggcacaaaggcgagtctgaaggaattcgcggcaaagaccaaacagctcgaggcgtacctgtcccgcttggaatcggccagacgaaaagtggacagaaagatcggcaagctgtcggggacgtcacctaccgccggtcatgccgggcaacgcggggaagatcaagtagaagcgctcggatcgccattgacaccttcgttaagggacgtgttgaccaatccatcgccgttgagcttttacatggagtttatggaccgcaggaaacaagccaggctggttcaattttggctaactgtagagagtttcaagaaccctttagaggaggtggattcttccgatgacgacgagcaattgggttactccaggttatcctcgtcgatgcaacatttggatgccgccgagctcggcacgatatgcgaagacgtgtcgatgatatggtcaatgttcctggatccggcggttgtcagcgaaccggtcccgttgcgcaacaagctctttgaaagtatccgctcgggagcgatgctcgacctgtcagagtcatccccgttgagtccgatcatactcgaccaagcacgaaaggccacgtttcgcgcgcagcgcgatatttactctgccatgctggaagaccactttcctgatttcagaaagacggacctttaccgaaaggcggtgatcgacctgaacaaggcgacgagaaagggttcccagatggtacagctggggtcggcgccgctcgacgctacatcgagaccgcaagaaagcgcgggagctatgctccgccaaggatctctctcaccagtcagctctgcatcgcccttgccgaatacgtcgacccagtcgagatggctgaatcagttggtagggttcggcggatctaaatcgagaggcaacgatgtggacccgctcatccctgctacgccggcaacagcacggcctcgacgagctctggcttcgtttcaagctcgctcgaacaaggcagacgaggtttcttcgccttccaaactccccaaagaactgccccgcgtgaggtcctggtcgatcggctactctagcaggaacggcgcagtcagtctgaccccggccccggctccgtctctacacgctctggggtttcttatcggtgacgaagcgaccgaagatcacaacggaagatcggctcttttcgcaaatgaagacgaggacaatgctctcatccccccagacacacagaggtttccatccgagcacgacgaggattatgtgcaatttcaaaggatggaggccatacaagccgctctcacatcaattatcgatcgtgatgatcagactcgtggcacatcatcggtggatgactaccggccccgagccagtatggatagtacgatgtatcccaggccctcaagcagtctcgatgttgtcgattccgatgaccgctgggactctcttggagcagtgccatccgcgacgttgtcacccgacctcggcgcaggcggtcgcccatccttcggagaggccggctctcgaacgagcatggacggccgtaaccggaggcccttggcattgcagccggctctaaaggcgcgcaggatgtttgacagttcagaggatgcgccgatctccagtgacctattcaggtcgtcgacttctagctcggtacccgtcctgtcctctctagaaaaacacatgtcgcccaacggaaccgctttgaccgtcctcgacacgcgattgagcctggaaatcgcgcgattaggtgaactgctggccaaactggacgagcaggatcgaatccttgatcagatgatcaggacggcagagttgacgggcaaggagggcgagctggagctgcttctcaggtctcaaagcgatcttcggcgggagcttagagcgactcgttttcgaaagatgcagtacgagcaacaagagatcgactatcgactggattctgagcggaccaaacttgctattccgaacgccactgtgttggcggaagaagccggaaaacagatcgtgcgatacgtggtggagatccggcaacattcgatcgaaggggaattcctgcaaagctgggcggtcgctaggcggtacaatgaattctgggatctgcaacacgcactgaaagcgtctccagcagtaggacccgaactcaaagccagaaatctagatgtgccttcgaagaaactcctaccaaaattgacagatacctttgtagaaggaaggcgggtcgcgctggagcgatacatgcaggtgagacgattatacacgctcggagctagtcgccgtcattgacctggctatgcttctcagggtctcttgcagatcccatccgcttgtggtcaccctgccctgaaaatctttctctcacaaacccgcttgaacacttcggccagcagaggccctgcgacgccgggaaagaccgtttcttccgggcaaaatacggatcccggtttgacatcgccaaacctggtccatagcctgtacaaccaggtcgcgtcatccctcgacgatatcttcctcaagccttcaatgatcgatgtgatggcagataagctaaacaggcaagccgtggatatggctgaagcttgggatgcaggcctgactcagatcggtaattatgggctcgagctcggaagctcggttttgagcccctacgcacttcgtgctcttaggacgccggcacaagacgccaatcagacagagagggaggcgttcccctttcccagcattcagcctcatacctctgttcagggtgaggaatgcggtcggcctccaccgacgcagccccaggccataatcgaagagacgagctttaccacacccatcactgactttatggtcgaagtgtttggcttgaagaatggcgattggctgagaaagcaagctcttgtgatcgtcatacaacaattgcttggcagcacgatcgaaaggtaaacctgcaagtccgtggcctctctccgaccagtcagctgataagggaacctttgactctcgcagaaaggtgcgcgacgggatcaaagtggccacatgtgaaacgtcattcggaaagtacttggcagcgtttcaggattcgctgtgggaagacggcgttcgacggccctctacaaagcccagaaccgaagttgaaaagtcaaaagccaagctgaacgctggacgcaaaatccaggcctttattccaggtgagttcatggccgaccgattgaacgcgcgtgaccccgtcgcggtgagctagagcgttgtcacgtttgatcacagatgtcgccgccaatatgatcgggcgaagcaacgcacaaagagccgcgaggcaagtatttggagcgatgcaaatcaggttattgaatttgcacatcatattgacaatcttggacgaggtgagcttggtctttgattcacgtctgaaaatgggccaagtctgaaccatgttcgtttcgcaatgcagatcatcgctgcgattttgtcggttgacaagtagactgcgtggtacattcataacgaaacgttacgagatcctttacgaagaccactataccctcatgtatctgattagaacgccccttgtcatccctaacgcacgagtttgtacataccgacggtgctttcgagacgggctacacccagccgctgtcaatggcggatgatatgctagtgcatcccaggacggtgacctggtgtagtgttcggggtaccgtcctgtttggtgtagaccctcgacaactgttgtcgcttgggatggactgatgagggtcgtggctcctgcagaccgaatacttacggtcgtcattgattctcgcatgctcgctcgcaaccattgtctgttgaacagagaccccgaggtgacgccaaagatacccctaggccccctcccacctccccccattcccgtgacattcgttccaatgtactggcttggcctctggtctgggtggtctggcgccgggtggacaagttctgtactacctcatttctacacgggggggcgcgcgagagaagtcatcaggacatgacgacggggacgacgactggccactggtcacagcagtgatacaagcgcatacctcatgcgctcgaactcttgcccattctttcgtccccgatggacaaaggaggatcgaatgagaagcggagcgacgagattgtctacaaagtacgacctccctccctccctccctggccgacccgtccgtcgtgcgtatccgagtagacctctagcacgccccggccagaacgtgcacatatacgcgcggcccgaacagaagaatggaaatgggaacatgcgataagataagatccccccgggcgcccgcaggaggggcttcagagtatacaacttgactatgagatgatacatgcaaggcggggagagtcggtagatgggcacgtggtggtgttcgaggtggtcggtcaatcgagcgggttggaatgatggtaacaagaggggaccgggttgagatcctgttcctataagaactgggtcgttcgttcgtctcccttggatgggtagggacgggaccctggcgcagcaggacggagggtataggaaccccgactgaggtgcgagttgcagtgttggtgtcgagtgagcaggaccgtgggtcgatttcgggttttggcaggtgtgacccgtgttcgaaaaggtatacgagagaggcaggttgagacggggcgacactattaataattgaaaggggaaaacgcagggcgtgatctagtcccatgctcgtttggctcgttcccgttgagactatgatcgaaccaggtacgggggagtttcgagggtgtatcagccgacgagccatactgtccccatcaacaacacaataatccgactcaccttcctgttctccctctgttgaaccttgttactcaactgatccgaagtccccaaagccttctcctttatcttttccccctttcgcttgttccgactactcttctgacgggccgtggccgatttgctcgcgctggcaccgccttggacgggttgagcgggcagtcgggcgttcttggtagaagccttggtgagcgccttggggtcggtggtttgacccttggattgacgggcggcgagagcggcgagcttggattggatggattcgccgttcgaggcgtcggtaggtgtggtcgtggctgtatgagacggggtggcggcgggggctgttagttgcgaaatggcattggaatctcgtccgactcgcctgaactcattttgcgtggaggatgatgattgtgcagctaggcgagtagctacgagtaggttgtcaagtgttcagatgtacggtcgactatcaactttgccgtgtttacagacatgataataactgctgttgtctctctattctctgttttcacgtgaacacacatctcaccgggcagcgggcgatgacgattgaacgggagagacatgccatgccatgatataacgacagtctacaggggtgattgctgacactctactactatcgccatacctcgtttccatagctataatccacagcagttcacacggtagtgtgtagtataccccaattccataaagaaaagcataaacgtcacgggaggcgacaagcacaacaagagaagatggggaaactcactcgtcaacaactcgaaggtctgaaactgtacaagtattcaggcatcgacaagtaagctccccaccaccaccgaattcgaacccgtcgtctgacatccagtctcgtacatctgacacgacacgcaggtccttcttgtcgaaaacgatcctgacgccgtattggaaccacctggtcacttatttcccaaagaccatcgcaccgaacacggtcagtcgcccgacgcgcacctcttacaagctcttgtcgctcacactttgcatgtctgactacgtattctgtcttaatctcccatgtcgatatctcgtcatacacctcgtatccgacaatccgacaatccgacaatcggacggaaccggaccgatagatcacctcgatcggactaggtttcgtagctatcaacatcgccaccctcttggcctttgatccgacgtaccaaggtgtggaattaccatcatgggtctacctctcgtgagtctcgacgtgaggttcgcgggcggggtggataggggatgggatggggatcggcttgagcggttatagtaagagcggggtgtagggagagagctgacgggtcatggtctttctccctctctctctctctctctttctctcctggtctttctctctcgttcctcatgggttcggcttcgggtttcttctcgcgctccacgtcgaatcttccatcggatatgatacggctctgtcgggtcgggtcgcactgggttggaacctcgctgtcgaacgacggtcatgttaccctgcgtttggatgtcgcgcacgtgcctcgaaaatcctactctccgccgaaccccgtcccatacctcgaacaccacccacaaaccggctacctgaaaaaacgaaaaacaccaccaccaccaccaccaccaccaccaattcaactcggacctcgtccaacacgaacgacaactctcgtctcgtctgatcgaaccggaccgacggcggatgtagatgggggatcggactcttcttgtaccaatccatggacgccatcgatgggaaacaggcgaggaggacagggatggcaggacccttgggcgagatgttcgatcatgggataggtgagtcaccggtgatcaatcgtcgaacggaatagcgcatcagctaccggtcagggtcgttcgtgtccagcaggggatcaagttagctgatcgagtgggcgtggcgtctgctctcgatcgcattcgatcccgcatccccgcgtagatgccatcaacaccagtgtgagtcgatcgcgcacgatttgacagaggtcggagagggcctcgaagctaaactcggacgcatggacggtttggatagctcgaggtcatcttgtgcatgtcggcgttcgggcagacgaggacttggtggaccgtcgtatgccaagcgtccagcctggccactttctacctatccacgtgcgtcgccgactcggaagacattcacacggggtccgtagacggtggacgctgattgtgtcccgctcgatcgttttgcaggtgggaggagtaccacacggggaccttgtacctctcggccttttccggaccggtcgaagggatcctcttgatctgcggaatgtactttatcaccgccgccaaaacgccagcgttctggcagacccccctgatcgatctcctgcccatcgcctcgcgcaaggtccacgaatggattcctaacgtgggcaccggcctaggggacgtcgtcgccggtctacacgccgggttgagcaagatggcttggttgagggggatcagcatcgtcgagagtttcctctactttggaggtttcgccctgctcggtaacattgccaacgcgtgagtgtcaaactccccttcccaggtgccctgtccggatggaacgtcgctgatcagcaggatgatcatccggggacgctcttcagctactacaatgtcatccaagctcgaagaaaggcaaacaagcccgtactcgaacccctcttgggcctcttgccctactttttccacacgtccctgttggtcgcttggttagctggacctagggtcgatatcgtacctacggaaaagatcctctggttcaccgtctactgggcagctacgtgagtccagtcgacgcggtgtgggaacaaatcggagtggaagctaaaccgaaaacacgttggctctgtgaaacaggttctcttaccaagtcagccatctgatcctggcgcacgtgaccaagagcgcgttcccttactggaacggaatgatgttgtggacccttatgggagcgatcgatgccaaccttcccaggtttggaatgtgagcgcttcccctgaaccgtaccgacctctctcgtcagcaatgggttccctatactgacctcgattgcccgaccccgaagcgattcgttgatccagacggacgacgtgaggacttggtactttgtcgccgggtcggccgtgttcgctatcgccaactatgtcaggttcgccaagagtaccatctggcaaatgtgagcttgtccccctgtcgcgtcgcgtgatggtgcatacgttctgatcttctcgacctcgtgcagcacggattacctgggtatcgcttgtttcaccgtgcgacacaaggatcagacgggtcattgggttgaaaacgagcaagcgctcgaggagaggaggaagcggcagtagaagataaaggggcacgtcgtagcgagatcgccttcaacggtaacgtcgatcgatatgggccggatgtttgtaagaatgaacgagaaaaagcccttacatggcttttcatgagataaatatagagagagagtacgtgtgaaagcgaaataaggttgaggtttgtacgtgatggaaactagctgtcccgcgccttgagcgcgtggaacagttgctctctgaaaaaccagtcttgtcacgcagaaggtacatcggtggagatcagtaagtgagttttgcgggaggattgcgagagtttctgtataattccggggtcttttgagcgtttggatctggagagtgggtgttggatgactttgccgccacctttctccagctttcgcccggttagcgcgcttgggttgacaatattcgagcgagaaaggacaagcgaggtcggacgagatcaacacagacgtacaacagagtgataatggtagctaccctcctacccattcgaccgcggcccataccgttcggtcaccatcgactgttcttgtaactcaaacatgtccacgccaatctctttcaccatccgaccgccatcgagcgagtcgtcatcctcgacatcgcgacccggtcaaaatcaagatcgacctccaagtgccgctcctttccggatacctaccgccccgacccgaccttccccactctcgacctcgagctacaccagacggtcggaacaaaacaatccgcctcgtcgatcggcctttggtggtgatgatgacgacgaggacgatatcgccacgaatggtcggggtggccatgggcgacaaggcaaccacaaagctcgggacgaggctatcaccgggttcaacgaacgtggggtggagagcgtgaacagggaaaaacctgcaggaccgatggtcatcgcttcccttcccaaccgggattggagacagtcgtcccactccaggagcgcgagacggccaacgtatatgcctgaaggtggacctagggtgatcacggccgacgatctggtagagaggacgggggacgatgtcgtgcaaggaggactacagcgggtcgagagtgctgcacccaccggcgaaaagctcgacggagacgtcgttatggctgcctctggagatgcccagcccgcattagagacacccacgacgaccgagacgctggaacaacaagccctccgagccgtcctcgcctctgggaacgaggacgcatcctcttcccgtaacatgaccatcgatctccagaccgatactctgaacctactcgaccgcccgcctggggacgagacggacgcctttcgacaagacatcctcacacgtcccgaagagtccacgatggaagactactcggccgtcccgatcgagagctttggagcggcgctcttgagagggatgggttggaacccagggtcgggacctaatcccagggtgcatgaaccgaaacgacgccccgccggactaggtctcggggcgagcgagaaaccagggtcagagcgtgctcaaccgggcaagaagaacgagacggcgagtcggactgagagggataggaagcgaaaggaggattacgcgacaagaggagggagggggtatatccccgttgtcaagcgagcgagggtaagtcgagcctctctatctagacagtcccggcctgtatcaagaccgctgatgagaccgcttgccttgtcggacttgcaggagagccatatggacggttcgagctctcgtgccgaatccccagcttcgagtgtcgtccaagctagatctcgagcgtcgtcgaggtcacccagcccccgtagtgatacttcgagacgtttagaacgagaacctcgggataggtcagtcggtcttggtgtctctgctactggaaacttcaagcacacgaagctaacgctgtggggatccaggaacggagaacgtgacacccagagacgaagcgatgataggtctactcgggatagggacagggatcacgggtcttctaggcggcgagaagacgagccttaccggtcgagcaggcgtgaagaaaagggctcgaggtacgattcagagagggatcatgaccgagatcgagaccgatacagagacaaggcgcgggaaaggggaaatcgagatcgaaggtccgataaggatcgggattacgatcgaaggagatgattgtacgccgagttcatgtcgacagccaagaatacgcgatgtcagcatgaaactgtaatacgtctagccgaatatagagctttcgaaaagctccgtaatgacatcgtattgagattcgagaagtttctgctactgtagcgttccgcttgtgattttgccgagtggtagtaaccgctcgaagcgtttccccctgagccgtaggcaatccacatctgtcgttatgttctgcgtgtctagtcgttatgtgatggttacctgcgcctaggccggctcgtagcgtatccaagagacaggcaactcgacgagccccgcccagcctcccgagtaggtgatccctcgactgtttcagccgcccgtcgttgaaccgcatcacgccgtgacttcctccatgtcctcgtcctcgtcgtcgtcctctgtcccccgggtcgagcccccaggaccagcagggcttccctgagcggtacccgtaccatcctcagtcccgaagagcggcgaagaatgggccgaaggggatggcgctttggacgtggtcgtatcgggaataggcacggactccatgtcgtcgtcctcatcgtcatcgtcgtcagcgtcggataggtccaggtcgatcggagcggcggatgtagttccctgtggacgagtttgaagttgaggcttcggctgggaaggagctgggatgatggtaatgtcatctccctcgatcttcggcttgacttgcgattgcgaatccgatacgggtcgagcggtcgatactgataccgaagtggaagtggacgctgaagtagatggcgctggaaccacgacctgcacctcctcttcagctaggtcgtcgtcgtcgacatcgttgtccccacttccatcttcatccccatcctcgtcttcctcgctatcactcccatagatttctcccaacctcaacttccaatcaaagttgccctccagctgtttgacgacatttcgggccttggccaatcgctccccgacgacctcgacggcctcgctcgtcgcccgatagatcccgggtaacctatccgcccgttcagtctcgtgtaacaatcgttgaatctcttcatccgagacgaaacccaacgatatgggatccttgtgcatggcctcgagttcctggacgtagtactcgaacaaggctaagcggtgcgtggaatagttgaactcgggagcgaaacgaagcgcaggatcgccttccatgtagagccgcatggcgtccggtcctcctccgaaatcccggctcggcaagacatagctcgtttgaagcaagttcggttggtacatgccattcgatgcgttgcccgagagaaggttcgggttacgcaaaaaggctgaaaagtcttggacttggcgaaagacatcctgataccactccaagagggtcggcctaacaaatacaacgtatcagtatttggcccgacgtgtgtttgccctcgacttgtcccaccgagacttgccagggatacatgctctgcctcgtccgatctcctacgggatcttgttgtacagtctggagtaacgtccctatcctatctctcagatgatcggcacgagccgccaacatcttgagagcagtcgcctgggcttgtaccgccgggtccatccgagaccttgccggatccgaccctgatggagcctgcgacatgtgatgtagacccgccgacatgacgaccttgtgagaagcgtctatatagtcagagtggaaagtattgtgtgtagagggacgtcctcgttgtgatcattgcaacatgaaagtcgaccttagagtgactctctctctctctcaaccgatcccggtctcgtccgcgtccaggtcgggttggagaaacaggaaatcatcttcttgatctctactacagcactaactactacttgtacatacatcgtgggcataggttctaccacatctccaagcagtatcataccctagtcttgctcggattgacaacccagatctgctctgatcgactctgaaacgacatggcgtacactccagcgtcatcaccttcgttcggatatcacgccgcctccccctcgaaccatgcatcaccacctccggccaaacgaccgtccagcggaggcggtaaacaggcagctatgaaccgacccacaaaatcgggcacgaacccggccaaaggcagagcaggaccctcgagcaattaccgtagacctggtacggccgcttctgcctctagagcgccttccctcatgtccgccaggtcgagaccgggctccatcgcggaatcggagagtatcggaccatacggtaggacaaagctcaagtcggctacccctggacctgggatgggccgggcgagtcgtccgggatctctacgtccgacgagcgagtttggcaaggacaactatgacgaggacgacgaggaggggaacgaggaggaggtcgcgagcgattacggtgataacgaggaaggcgaaggagaggccacggcacccggtgaagaaaagaaacttttgagcgccgaggaggagaggattctcgaagaaatgagcaaaagagaggtcgatctgcagtcgtacgtcgtcgtggtcgtcgattgctctacgggtgcctcgatccgtcagctgagtacatcacgatattcacttacccaggctgagaaagctcatggaccgggatcagcaacgccggcacgacgaactcaagtcgaccaatttcaccttccagtccattcaaaaagtcggtcaactcgctttgccatttcatcgagatgcactatggtcgctcatgtgtcatactgccaggtctatcgagatcgataccccggtgcgggccatatagccaagaacgttgcggctctaatcggggtggtcgccaagacgcatgtaggcgaggttatcgaactgggtgagcatcatcagcagatcccggctcctaggatgaaccttcaagggtagctgacccgtcgtcctggcatatctcgctgaacagccaaggctaaccaactccgcaagctcgagttagatcctagaccgtccttccatctccccaacaccaaatccgcttcgtcctcatcctctaccgcggtcgcaggtggaccgacatcacaaccgaacgcaacgagcggaagcgtacaggacaaaccaaaaccaagacctctcaccgcgggtgatctgagagaggctttcgagatgtacatggacaacgcgaggcaagtcaaggggaccgcagggagaagagtgggcgaggaacgcaagactgggttgtttggcggatgggcttgatcaagagggatccacagagcgtttgaaaccgattacgattatacgaactctagcccgggattcggatttaacgacctcgttgtattgttacgcaagacacgctgtatctatgtgctcgaaccggccgaccccgccgagatcgatcagagactgattgatatcttccaaccgaatgcctagtgatggatgcaaacaagcggtacttgctgtgatccacgtacctgcaacgtcacattattggtgaaacctctgatccgacgaccctcatgattgcatctcctagaggtcgcaggactgggtctccgccgtctctcatcatgatgccgactctgccctccttgactgagcattcttggtcaaatctctgttccgacgacttggtccagtgcgccaaccagcgtatcttgatattcttggcttggccaccataggttcgttcttcatcactccacagatacaacccaccataggtgtgatgttggtccccttgaacaaacatgcttagcgatccagtccttataagcagcggactggaatgggtccccggattcgaatttctacaacatattccaccatgcagctatgaaaggcgcacaaaacagcatgttgcacgtgcagacaagtttctggatgccgttctcgaggtcttggctaccgggccagccaacagggcagagcccaagacctcaacgacgtcgccagcgacacctcacggcgatcaatcaaaagtttcgttttcatggcatacggtcgattacacggtcaaaaacagccagcaatcgcacgcagagctgctgaagactctcgactcttcatccgggtttcgaacaagagtagcgtggaaccccgacagcaaggcgtattttcacatcaggaatcaatagaacaggcagagagggaacaaacgagggtgttcaggttgacgagaaccacgatttttttttcttcttcttgccgtctcttgtcgaaagacaccatcaaggctaaactttgaccccgtcgcggcgagaccgcttagtacctcgacctggggtcgtagctgcgttcgtctcggtatccgccacccgaactgccacctcccctgtagtcaccaccaccaccaccgccaccgctgcggtaatcatgaccgccacggtcgtaacctcgctcgtaaccgcctccacgcctgtcatcgtaacggggctcacgacgatcatcgtctgttgcgataggtcggaaaaacgctcaggatcttgctgctcactcctaccgatcggctcaagaggactcacaacgagaaggtcgctcgtacctgtccctgtcatcataaccacctcggcttccaccgtaacggttgtcgtctgatcgaacgggacacgcaagggtttaacgtaggctcgggggacgtcacggggcgtcaccctggtactcacaagatcgaggctcgtagtaacggtctttgggtttggcggcgtcaaattctattccatccggtcgggttgtgtgtataagatttttagtgataacttaccgcgttcactataagaataaataccagtcttgggaggcccgtagtaccttcccggggtgggggtcctggctcgagcacgacgggcctgtaatatggtgtagagaagggatgcatgcatgagtgaatctggcaatcacgtgcggtcgctgcgctgtcgatacgtacgtgagcgacagtcatgaccttgcccatgaactccttgccggacaattcgtcgatagcacgagcggcgccttcggggttcatcatcatgacgaatccgaatccacgagagtccttggtgtgagggtcgtacatgacagaggccttgtcgacctgtaaatgcgagcgcgacgacatcagaaaaagctatcgcagaccgcgcaaggccgaacacgctgtactgacttcaccaacggcgctaaagtgcttgttcaagtcatcggcagtgacggcgtgggcgagacccgagacgtgcaagttcatgccagggttctgagcttcgttgccgcccctgttgtccctgtgcaaggtgacgtgcagaagaggaggtgtcagcaaagtatggcgtgtcattgttaatgtgcttgccgggctcacctgcctcggtcaccaccgcggtcgttgcggtcgttgcgctcagctcccctgtcgtccctctcttgcctgtcctctctctcttctcggtcctcctcacggggagcatcttgagcgggagcgggagcagcgacgggggactgcgatcgacggctggggccgtcctcgtatcggtcacgttcacctcggtattctgtggaatacggtcggcgagtcgagatatgtagcaggaagtgcaacgggaggtatggaggtcgtcagttgctgaataatgcaggtgtgtgtcgagtcgtcaatcgagtcgggaacgctatggggttggctgtcgttggtggatattttgtgtacaggcacaggctgggaggtccacgagaatcgaagtcggactcgcgtttggccatcttcacacccgtcatcctgcactcctccgaatcatcgactttccggtagctgccgtctcacggccgctttcgttcagacttctctccacatcgtcggcttgtcctcgactgctgcacgaatcggcgacgaccggtaaagacgggctgaactttgtcgcggcgaggtgtactgaagagaaggtgatggcggatcgacggatgctgctgaagacgtaccgtcggacattgtcaagttactgatctgtttcccggggtatgatgggttgtgtatattgggaaaactagtgtatcactcatcttggtattgaatataggcagatcatcgatctgaccgggatggatcatcgagaggtcgtggtcagcgcctggattgagcgaacaagaatcgctttctcacgcgttcattcggtcacgttagcaagcgagccaattccaaaggtggtggtacactttcgttcaaattctatcgtttacaaccgtttcaaatacgtggactaaagtccagacaagtcaaagtagggaagaaaggtcacccgtctagtcatgtaaagctcaaggtcagtctcgcgaccttgggacctgaagtcgtggactcggctcggccaacgcaagtcgcgattcgcagctggtgctgatagtccgacccgaagccgcgccagtagtcgagagctagacagtctatgatgtcggggaaaccaaattgacgatgcgaaagatcataagcccggaatcatgctgaggtcgtgcggagtcgtggctggaatgttcaaagtactatgccggaaaagaaaaacctcccgtgaagaaagagaaacacgctaggcgcgagaccgggactgaggaggttcgggaggcggtggtgtagcttgagtcttgaaatacggatgcttcaacgcgttgttgaccggtatccgcctgctcgggtcccaatgtagtagcttcttgatcagatcacagaattggacagtgtgctcgctgtctgctcggataatgtcctgcgaagcacgagcctccacgtgagccaaaatcgacgcatgtcctcatgggctctttaacttacgtcgagttttttcatcttcttgacgtaattacggctgttcttggttgtcgaggagttcggaaagtcgatcgccatgcccttgaagaattcgcccttttgtactctatcgagttgcagatgaccggcatcagattctcgcgaatccaaaggcgctcacagttcacatcgactcacttggctttcctcatgagggcgaccggcatcttgcccattaccacatccatcattgccaagtgttccaaattgtcatgcgtctggaatagggcgtcaccggtgaaaaactcgacgaggatgcatccgaccgagaacatgtcgcaagggaaactccacccgaggcctaaaatcgaccttgcgctatcaataccgcttcgatttcaccaaaggacgaatttccgaagcttaccaaggatgatttccggtgctcgataatgtcgggtgctgactaccgacgagtggaactcgttgtcaaaagtggcgcttccgaaatcaatcaaccgaatgtccacgttccgcaagatatgcttattcttcgcgcccttggcctgacaaacagaatggatggtcagccggagaaacgccatctaagacacgaagacgggatggatggcttactcttacgcctaaggagtaatgcgagttttccactaggagaatgttctcgggcttgagatccgtgtgaatcagattcaacgaatgcacgactgcaagaacgagaccattagcttcagctctccgaaagacgacgatggcttgtgcagcgactcacaactgagactcgtgaggaggtccttggcgaaactctgaatatgggcctctgggaagggctggaagctgttgcctttgaggaaatcgaagacactctggccgagtagcggtgtcaccaaacaaatgtgatttcggtagtcgaaatactccatgagggagatgcatttactgatgagccgcgtgaggttagcgctcgttccgcaccgagcgaacgcactgacccgagttaggaatacgtactatcgattttgaggatcgtgctccttcaaggtcttcaagactcgaatctcaatggcgctcgcttccctatactttggtaccgctcgaatgatcttaatggcgaccctgttgaatgccttggcagcttgtgcttctacgaccttgccgaaagtcccttgtcctagcagtcgaacgatcttgtctgtgaatttgatttgcagcaggtcagaaagtgacgccattcaacttgccctcgttggctcgactcacacttgtcgccttcgcccatggtatgtccctgattgatgatataatgcccgtccggatcgtcccacggaggtggaggatcacctgctgcgggtgcgaccggttttggaagcggaaggtgagtctttcccgcatgaggggcaggctgtgcgtaatagccctgctgagctggaggatgtttgccattggtgtacgggagatacttggtgttttgattattaccggcgggcggatacggatactgattcgtgcctgcagtcgtagcaatcgtcgattgtgttgcggttgacatcgaagtctgaatcgcaaggagatacacgattccatcagtgggtatttcaacctcaaccggaagaacccggcgctcacatctagtttctccagctgccttcccgctattcgtcgtgatgcagattctacctctccgttcgtctttctcttctttgctgctgcagaagctgcggtgttcgatgcggcattcgtcccgccgacttttctcttttgcccagtcccgttctgcccagcggtatcatccccgctctcgtcatcatctacgatcgtcacgctatgttgccttccatcgaccgtgacgagatctttgcgatagatcttggcgcgggtactcctcacgatcgaggtgtcggccaaattgttccccatcgctgtagatcgacgagatccgacggattcggcgtacccccccgcacctacgctgggagggtgctggctcccagagacgagtccgaccctagagctatttgtgggagcgcggtgaggcggcatattgtctgcgtactgttggtgatggctcgatgggaacggatactcttcggctcgataagaaggatagccttgataagcgtaagagccgggtgtcgaattggaggattcctctttgacttctcttctcctgacgtgggccgcacgggtgacgggaccacctatcgaagggttatgagtgggtggtaagaccgcgtaatgtgaccctgcgatcggatcgacgtagacgatcggttctaacggttcaaagacgatctctcgaccggtcctggctgccacctgacgagctcgtcggtacttgtcctcttcagccgcgatgagagaatatgcgtaatcggtcgaaggggtgtgttccggtgcagttcccggtgggagaaggtatttgagagcgggggtgggaaatctctctcgaagcggatctagcggggtggtagcggcaggagtaggaagatattgaggcgtaggtcttcctacgagcgctcgagagcctagcgactgatgtctcggttcttcgagtccaaagggggatgagttgggtccaaccgagtatggatactgagcgtgtcgtggtgggggagggggaggaaggtaactatcctgatgttgctgatatgccggatacggtccaggaagcacaatcccggccgtcaagggtggagggaggtactgattaggagaaaccaccgtcgaattccgtctcaacgctgggtcgaatccgtctgttgggcggggcacgtcgagaggaggaagatgtcggttgaacgccctcgggtcggtctcgacggtttcacgagcctgtacaccagattcaggtcgtcggtcgttgttgccctgaacgttgttgctggcgctatcacctccgacgtcgttcctacgatgtaagagccgataccctggtgcaggagacaagtctccggtcaatggaaggttgcccgaggaaggacccgcgacgacgtgttgatggtacacgcccgagtctggtcggatggctgaagggggtccgtagtaatcttgtcgagaggccgctgcgaggtactgtgacgacgaagcggttgccggacgaacggagaagtcgtctgggccactagcactagggggtggaatggaaatgtcgtactcgtcttcgtaaccgtagttgactggctcgtgttcgtatcccgaaccttgttgaccgttgtggctgttcgtttgcaactgacgtcgaccctgctggtaatgaaccgaggatggacctgctgattgaggtggtggtggtagtgaaagtgggctcgatgcgggatgatgaccttgacctggaccgccgagcgagatccggctgtctctccgtgtagcaagttgattgtagcgatacggatcggcagcagcgaaatccatataggtcgtcgtcggcgtttattgacacggcgagccgtggataggcggaaaggagagaatgatggtcagagcgatcagggtctgcaatgaccgcaaggtgggcgaagctgttggaggtcgtcgtttggtttggactgatcggtgagcgaggggcgggcaaggtcgatgcaatgcggtgtatggtgagggccgctctgagggtgaggaggtgggttggcagaacggtttacgattcgatcgaacggcgacggcgacaagttcagctctgagctcgatctgtattatgatgctggctgcccttgaagtggatgacagtgaacagcgaacggtagtcgaggttaattatgtccttgacacccccttgtcggccccaaatggagttgacggatatcgtcgagctgagcgggtaaggtgctcccgcacccgtgaaagcgcaaacactctatattctaaagacgttcgacctgctttcgaaacctacacaaccgtcagagcaagtcctcttgcactttacagagacagcagagacgaccaccaagcagataatggtcggaaaggctgtccgcaaggtcccaatctagtgatcgttactgcagcgcttttcgaacgaggtcaagagagttgcagcaacaacacacgtttttgtcgacgacaaaagataccgagatactggcacctatgacgaccttgatgatgaccagcaaattagatagcactgtagcacgtagccttgaaaatgacatcctgatataatgcagtttcccaacccgcttagccccgggtagctgaaggcagatgacttgcgatggctggatagaaccaccgaagtccgccaatactactagtaactactgtgtgatcatctgatcatcactatccgctgtgctcccttccacgtaggatcatgtacgacagtcagcctcacctgacatcacgtagcctcaccgatcacgtcagtcctatctgtaaataaatctcattgtgttttagggggaacgtcgacggagtatcaaacagtcgaccggtgttgacacggtaacagcggcgcagtggccacaagggacccggaaaggagagtcaaagtgcttggatattacgtttgaacccctgaagaacccttgtcggcttttcaaggtctacgagctggcctcccgaccagcgccagcacaccttgcgagcaaaaggaagcttcggcagcggagcttgcggcgcatcccctcttgccatagcggtaggggcagagtcgcacgaacggttgaccaggtcgcctgcaaattcgattggatacaattccacacgttctataatgtgatactacacagtgaatgaggatgagctgggtcggcggggagctccaattcattgagaagctcctccccagttcggagggatcatcatgccccctcccatccccattgggttattaccctgcattgattgcccatagccttgcatttggtaaccctgttgttggaactgctgtgacatttgttgctgctgctgctgctgctgctgctgctgctgctgctgctgctgaggaaagtacccgccattcccattggaaaagctcgaatacgggctcgtagccgcaagagggaacggggacgttgagcccatcgccaggttgttccccatgttcatctgcattccattcccggtctgcataggcgtcggcatggaaccgatgcccatcccgttggtagacgctgctgcgtagtagccattagtgcccattccgttcggcgagaattggttctgcatcgtattgttcatcataatgccaccgtagccctgctgttgttgttgttgagcttgttggccgtatgtcgaatagccttgttgcatggcctgcaactgctgcgcttgttgctgcaattgttgttgttgcgcttgttgctgtagctgctgctgttgcgagtactggtttccaaacgactgtaccggtacagtctggccagcttgaccggtcgctggcatcgcagcgctagatcctgatccggatgctatccccagcagatcaccaaacgatcctccactggcctgttgttgcttttgctcctggtattgtgtttccaatggcggtgccacttgcgattccggtcgaggagaccgtcctccattcctagcaaaagggttcggcgaccttctccctcccggacctgtttgcgaaacgtcctgagaggaagccatcaacagatcgttccagttgtcctggaccatgttcttagtcgcccccttgcccgcgccggatgcgtacgatgcggacccgcccttgctcgatgaaggcagagtataggaggaagattcttccctcgataagactggaatttcgagcgtcgccgagtgcgtcggacgaggacggggtcgagcaggagaatccctcgtgccgctggaccgcgtagcaaaaattggcgcacgggcctcttcagtacctccgggggtgcgggttcgagggacgacaatatcgttcaactctgggttggggctttgacgctggaacgacccggtggaagacgcaaccgtgaaatccgcccggatcgatcccgctcgtggacgagcatcgacgggttcaccggcggaccgcttgaaccggccttcgacgtatttccgtcggataaacttttcgagctcgctatcccggtcgttgaactcggacgtgttggtcggcggagggttacgcgactcgtcagggttatagatcgagttggccttggtattacccatattacgcatggtctgtaggtcagataatggttcttgcgtaagcgatgagaggtagcgcgtattgtgccggtgtactcacctcgatcatatctttagaccagtcgctataatcacagaagttgatgtcgaactcagcacctctctcgcggaagtattgtatgtttgccgatcgacactcactccatcgtcacgctcttcctgcgatgaccgaaatccaagggcgataccacgtatacctctctcagcccaggtccctggtacagacgatcgagcgatactcacacccgggaattatgtgtgcctagcttgcggtgtactgaagcgcattgtacgcagaggaatacacctgagacgtttgaacgaccgggagaggcgagcgaggcggcagtcgaagtgaggtgatcgaagtcgccgagccggtggttgtaattgcgagagacattgcagagtccacaatgtgaggccggatagttttatgcgaatgagaaatggggagtcagtcattgtgggtcggtgatcggcaactcacgacctcgatgaatatcgccaggaggacgggagtactcacccaggttgatactagcccatctgggagcgggagatcgacagtccgcacatttatctatgacaggatgagccccaccagataaaggacagatggcgtcagtccggtcgatctagtgtcccgagatctacgactccggcgcaacaatggtgccgataaacggaaaaagccgacgtactattccccggctgacggagaacctcttccatcatccgctcttgacgagctttagctgctgacatatttgatgctagcgatatatagctgtccgtatctcggtgagtcgactagttgcgggtttcgaggaggtcgagttgtgtcgagtcgggcttttcttttgtggtcgtgcgagtcgtttttcgcggtcggcaagtgatgatgatccgtttatagcgtattgcggtgtcactttatagtgtagcgatctgccatgtgctgagagcgatgtctgacaacacaggcaaagacggatgtgaacagcgagatgagtgttcgggtcgttgatgggtatgaaaagggactgatcgtcttgtaacttgatgggcgagcagcttgaatggtgatgacgcatattcaaacactcactcgctcacctcaaagtcttcaggcgaacgattggagcgattccaacgaataattcagactcgtcacgacacctcgctcacgaatctctgcacaagctggcttcgtactcgatctaggctctggatgtgacctaggcggctgtcagtagagcagtgtgtaactacccaaaatcgatgtcctgatgtcttcccctagtgatttcatgttcgaccgggtcgcggaagcaacggccgccggttactagccaaagtgggcaacgcagggtaaagggggttgaatgcccatctacatctacatcatatcgactcgtaagatagctcatactcctagcagcacatagagtgcatcgcaaccgttcgtcgttccagagtgattcagcgaaatacatcgaacatgtcgtccaacacctcgcgatcgtggaccggcaagtctgtactcgtcataggcaagtcggaacttgatcacggaaacccgtcattaggtattgatgagcattccccgtaatccccgtcctgtatcatatgcatcacataggtaatggcgagggcttcagggaattctcagagagtttaacacaatctgggtgagatatccaggtccattcacacagagccgttgaattgatctcgacatatcgatcttgatagttgccgagtgacacgaataaaccttttcaacccatcctttaatagaacgccgaacaacgccgccgagcaaaatgggaaaaccggcgaagagacagttgagattggatcctatgatttgctcgtcaaggcctttcagaggacgaggaagagggaagggaacgtggacaaggtcgtcctctggttacccggtggactaaccggtcagtccgaccatcatccatcgttgttcaacttgataacataaactcatcctcaacgtcgaaatacgaaccttcccttctgcatcacggaatatcgattgctctcctcgcgaatgaacgtggaatcatgtaacctcacaggcccgctcgtcaaggcggacaaagccctccctccgcccctccccgccttggtagcatacgtgaccaagctcgcctcatttgaattcagatgggatgagcggccaggcggagcacatggacccgacggaacagggagaggggaattggctcttgtgctcccattacgtgagtcgacgagctgggaagcgggtgagggtatgcttgcgagatcggggctaatgaggcgtatcgggcgtgatcagcggtaacgagagacacgatcctcgatcctgttgatgcggctgcaggtaagtgctttctactccgggctagacgggtcggatcgaagactgacgcgaaaccttgttcgtgtactttttagccagcagtattctagggatcaccaggagcacagcagcacaagcttctttggacggtttcaagtgagttcgatcgtcaatttcgacaacggtcttcatgggtcctgaagtcgcccttttggacaggatgtggatgctctgtcccggggaaccgaaggatgcgcaagagaaagtggacgtctccggtatgtttttccccgaacctgtagcgttaccagaccgctgggccggacgttgacgatatgtgcgatgcaggcttgattgatgctttctacggcgtcttgactaaacaacacggtcgaccattgccgtccggcgaagagtgagtctggagccgacggtgcctgactgactacattgcgggagacgacaattgaccggcccgttctcgtgtccttcacaaggaacgctccggtttacgtctctaagaatggcgatttgaccctcgtcgatcgcccagacaacgagttgaataaagccgaggcatacaaacgcctcggcgagcgtgggaccttcccgatggagtgagcacagcctattcgtacggcaatcatgatttgctctattctgacctcagtattgtcttgacagactcggtaacaagatcagggacgccattatcgcatttaccttgatggctgaaaagctcaacctcgagcccaagaagctcgctgtctaccttttccaagcggccctggtcttttacacctacctctggtggaaaggctgggtcggaatccccaagatcctctggttcgtcgtcggtgccggtgccacgaaagccgccatcacgatcagagccagagaatccaaggatagcctgtcgaggaatgggaaacgtccgaccgcggtctttctcggttctggtgcgtcgggacccctcgcgcagggcaaagcgagacgctcgtagcaaagcgtcggatgtatttggttgtactcattagtctcatgaacgttgtacaggcgggcatacgagcgaggctctgcagctgctctcggccttggaccacgatgtgtataccccacgaacctatatcgtgtcgagcggtgattcgatgagcgtcgaaaaggcggtcgcttttgaaaagaccttatcgacgggaggcgatggacatggcgtgtacagcttcattgagctaccaagagcaagaagggtcgggcaatcatacattccctctgtttggacgacgttgatctcgttcacgacggcttttcgattactggcgatcgagccgttacgaggcgatcatacacagcggtgggatctattattggtcaatggccccggcacatgcgtcgtcgccaccatagcagtcatgctgccaagggcgagtgctctagctgtgtttacgcgccctttgcaatcgctcacgtcgaatatcttgcagattctcgcgctgcattcacctcgcatcatctatgtcgagtcgtgggcacgagttaaatcgttgtcactgagcggcaagattttgaaacgccttgtcgacaagtttgtgattcagtgggacgaagtagatcgaccggccaatacatggacctcgaggtctggggagatgcgcccagatggacagggcagagagacgagtctaggagattatcacggctggttgatctagatataatgcagcgagatcgagcgtttgcaatagaggtcacgagctgtgcttcgtgagcattacatgtcaaacagttgaagtctgtacagtgcgttatgctctacgtgacccagatcatgtcgttctaacctggaggacgcggccccaatagtgtgttgaggagatcgcctgcgtccctctgcttgggcggcggcatggctggcgattgggtcagtccttgcagcattgtttgcggttggtgcggaccagggggcaccggtatcattccaaacggaacagtttgcatagggtgtaacggaatcccggggttgccattgtgaccattccaaaaggcggggccgggagggggcatttgttggtgaccggccaaatgcggcgggacatgatgcgacggaaaactagcaggaccgaaatgtggtggcagagagtgcgacggcaacccttgaacgggctgatacagtggctgagcatgttgcgaagacatgtagtggacgctgttggatccaccagtcatgtgattgggttgttgactggcgggctgaccaagcccggccatcatgttgtcgaggagtgctttacgtcggccctccttgtcatcccgagtggacgcgaccgaacccggaggatgagatgcgtaattgacctggggcggaaagttgattggcggtgcggacgccggcggggtgacggtggccggagtggccttgggggagagcatggataagaggttccgggcgtgaacttgaccaggagaagcgtgattctgagcctgagcagggggcatggcgtatgctgaagtaggaaacgcagggggagctggcgaggcatatgtcggtagagtcgtcgtgttgggcaccgcaggcgatgccaacttggccaacaacgcctgcatcgcattgccctgactagtctcttgtgcggcttgcgtagcgatttctgattttgtagcgggaccttcgttccgtacgggcggactggacattcctcggccagcggtcgactcgcccaagaacctggaaaacaaggcatccaacgtctcaccacgatcgttcttcttggcctcgcccgtggcggctgaaatatgggtagcgaccgcgggatcaccgagctcgatctcgactttgcgggaagccgtgatcccgtccgttcggacctgggtgtcgatagcgaccggctctgcggcggtgggtacgggtgtgtaactctcggattcttcatccatctctaccaaggcttcaccctgaatcgtgttcggtcgagacgcctgttgacgatgtagcttgatccattgtttcagggggctatgcgcgtgaatggtggaattgcttttcgtaagctcgcgagctccggtttcgtggccgtctaggagacttgcgcgacgaatggtgcgaccgagtagaactttttccccgacaccttgtgtttctgccttcgccatgtcggcaagtctgacaacttgacccattcgatcgcctgcaatcgttacgagatccataggtacatcggctgtgagcaggctggccgatgatatggcaggagtcgcgtgtcctcgatcaaaactcacgctaatctctttccgcgtcaacgtctcgaacttggcattcctaggaacgtcgcagacgatgaacaaggtcatcttctgatcgttcatcgtcacttcgatgaaatcgtccggattcatgagcggggttatgtcgtatccgatctcttcgtgaacctgtatgtgaacgaatgcgaggcgagcgcgtcagccgggctttctgacaaggatgagtgtgttcacgcggtcagactcgcctctcgtacggcacactgccatctctcttcctcgtcgttgatcttgcctttcgggaacccccacgaagcgctcgacttccatcctttgaccaatacgcactaagaattctcccacaccctcgcacgcgtgtcagctgcgtgcagttcggcatctcgtcctcgccatcgtcatcaccgtcccccggaccgacgctcacctgctcgcaagcgctatccagcaagatacccccgcagaccggaaccctgttcttgtacttcatgaacctctcccataacctctcgtacccgtcccccggactcaaccagtgcgagaggagcggacacgagaggaagaagagggaggagaatgatttcaggttgaacgaggggagggaaggatggtccgtccggataaagtcttcgtagaaccagtgcctgtgatacgggatgtaggtgggggtgtatgtagtagggtatgatcggggtttgggtgaccaggttggagaggaacacagagacgtgggaagacgaaacaaacgaaaagttcgatcaacaacttcatacccccctcgacgaacgacgatctgtctcgccacagagcacacgggtctccgatgtttccccggccggaacaccaactcacgcctgttccacctgaaaacagatcctctctgggctcgccaattcctcttcgggcaggttgaggatgaaccgactgttccatgccgaccgagccgcggtgagaagcagatggtgcgagaggtcggaagtaggcatgcagaggaacggtcgggcgtcgggatcaagtgtttccaggatcggattccagattgtgacaaagagatccgcagcatgggaacaggaatgtccatgtccatgtccacattcatgtgcaggttatcgaaccaacacggaccccaccaaccaggtatcgaccgaaaagtcacgacacggttagatcccagagtagcagagtccacgtgattcccgggtgatcaagcgatcgtcatagccgcgatacgatgcatcaagcggagacgtagattgcaaggagccgttttatgggaagcgagatgcatggtggaggtgggaatgggattgaagcggaggttgtagggtttagcgaaatgatatctcatcaccatgacgactctaccaaaggacaagatgggaacggggcgttcggagacggatttgataggggagtagggagggggagggaaagaggatacgcggaacagggtgccgatggatttacctggacaagtcttcgaggacttcttccaacccggcttccttcatccaatgctccaagatcggggtgggcaaggcctgttctgacgaagagacgccaatacgttgtggtcgagaggtcgagggggctgctgttacgggtgctgttcccgatgttgatgttgacgctactgccgaggtgggcccgacctgggtcgatgcgggtagatgagggggaggttgtttccgtcgagattgtttcgttcgagaggaagatgggttaggattcgacatggctgtcgtcggagcgatgaggattagagcgtgtgcgacgttgatgagctgccaaggggacagattgcgagcacaatggttgctagttgctagttgctagttgatgaggatgatgatgatggcatgatggacgagcggatgacccatggtctcggttccgaaggaagaatggtatgaggtgatgatgagctggttacctaatcagggggggatgccggcatcacggcatttctatctattacggcaaatcattacgtccttccccttccctgcctccctgcccttgcctgcttctatttctcttctccatcatctcgcgtctctagagccaggttagcttgttagctcgtttcgcttccaccttgcagcgatctactcacattcaaacaccctcgtcaacttgaatcgcacccgtcatcatcaacatcccctgaacctaccaatccttgcacataggtagtagcgtagcaaaggtctgagctgcccatcatggtcaaatccgtcaacgtggctgccctctccagacggatgcccacggtgagctggaacccttcgtccttcatcccgcatcatctccatctccatcttcgaccttgatctcgacctcgctagtcccccgaatctcccattcgcagaaagctgattcctgtctcattccaatcgggtcgtcgttttataggcaggaacggtgagtccaggtccattctcgcgaccagtcgaggaggaacaaaagacccctccacggtcgagtcgagtcgcgggggagagacgaactgaactgatccagtcgattgcggatattactctacctttcttcttttgtcctacattcctctctcttccacttgaatgcggcggacgtatgcgtttcggatgtcgacgcttcgaatcgaatcacatcgcatcgtctcggtattcggggatttgaattcggggactcggattgggatcacgataccacgggaatcaccggggtgcaccgatggatggatggtcgagtatatagttgttcttagggatcggtgagtccgcgttcctccatctcatctcggctcgctcgaccatcgatagtcgcgttcgggaacgagaggggactgatcgtgttccgatactctggatgggaatgtgatagtcatcgggctgatcatcaccaaggcgagttttccaccatctcgttgtcgacgagaaaatccagagctgatcgtcgacattgtttttcgttcgactccttcccattaccatcacctttcgtaccgtcatgcaacgtaactcccgtgacatcgaccgggggcgatctcgtctggtttatcataccgctcgacacgtttcgcttggcaaatcacctagttgttcacgagctccccaagcgtgagtcccgctcgctctgatgcgccgtacactgcgatcgaggtcgtccgagctgacgaactcgcttgggtgtgtagcaaacgacggcatggtcagggtgagcagtctcggtagtcagctccgagataaaaggacaaatagggtgttgatacaagatgaaatcgatgggtggacccggtgtaggagtcattcggggactttgaggggcaatcccgttaattcgaggttgagcaggagtacacagttgccgtaagtcgagtttcagggacgaccctcgggaagatggctccacatacggctcgtcgtgccacctcggtactggtcgctaactagtctcacgctcgcagcaccttgacgcagcgataccgagtgttagaactcatcgcctcgctctcggcgcatcatactaaagagtgcctgagacaaccccaggacgtgtacgcacagcaggtacacaagcgatacgagcccctggtcgggcacaagtcgtactctaccggaaggagctggttcgggttcggtgggagcggggccgttcctgatacccatacgcccgagttgatgggcaggatgaacaaacggagtgggtcttcctcgtccaccaacgcgctcctcgccgatggatggaacgagcacaagaagcgggatctcgtctccaagcagcacaagtacttcttcgccatcaacctctacaactcgtttgacgtcattcccgatctgttcgcgaccatgttccggacagccggcgtgctggggtaccacaacgtctttgtctcgatctacgagaacggatccaacgatcagaccaaggcgctcttgaggatctttgatgctctcgccagggtcgtcgggatgaggatcatcatccgtacctcgatgaggacgcgaggcgcgttcaatcatcgaatcgagtacctggcagaggtcaggaacgccgccatggtacccctccacgagttgagggacaccgagggggaaattttcgacacggtcatctttatgaacgacatcttgccttgcgtagacgacgtgctcgagttgatctggcagagcaggaggcaaaacgccgggatcacgtgtgcggcggattacatgtttcacgacgatatcgtgcgtaggccttcccaccctgccgggtcgttctcggaaggggtgatgcgatgactgattcggcgcgtggtcatccgtgggggttcttcttacagggtgcgcccgtcttttacgacaactgggtcgctcgggatatcaacgggaccgcactggagaacgcaccctttgagcaaatcttccatcataccgagagcgagaaacgattcatgcaccacttgcccgtccaaggtgagatccccgtggacctgcgggtcgggtcgcctagatagcgaacactctaggctgactcgtgacgtgtcgacatacagtacaatcgtgctggaacggaatcgccgtcctggatcccgcgccattctacaacccgccgcacgtgaggttcaggatggccaagctgtccgagggagagtgctctgcctccgagtgtgggctcatctgcagtgagtctggcggttcggtcttggacgcaaatgtacgtgcagcgaataacgtcgctgatcgccggtcgtccgggttgttagacgattactggaattcgggatacggaaggatcatcatggtccctcgtgtcaagttggcttatgacaaggtgagagccgggtcattcatctcatcccccatcgcctagagagcttacgctgattcgactttcatcggtctgcgcagcgagtatacgacattattcaccccgaacgacgaaacttgaccgctatccgaggatacaagcgactcggaggactgcctgacgatcctcatacggatcctcaggacaagaattggtacggacctcacgaccgattgttcgtacccgaagaggacgaggtgttgaatttccagcctgggcccaagtatggtgagtttcgcaagcgcagcagaggatccgtagatctccgagctgacaaatccgttggaacctggtagtctggtgttggggttgggacggtgctggtgacctggatggtcccgatggtgagtgatctccgcgagcgagaggtcgtttggaaatggatgctgacgtggtgatacctgcatcgctctagtcgaccccatttgggaagaacaggtcggtcgaggccatagccatgatacttgtacaaccacttactgacccatccaatcgctttctgtctgcagctgccgacgacgtacgacaaggactcgatcttgatcaagcacgaccggtctttgcccgggtggcaatgatcgtgccgtttcggcctttcattcgggccgctcgagccgcctcgaagtcggtctgacactggggggatttcttatttttagacgtgctctctatacttgtaaccccttcttcattccaggatgatccatgctggtcttttcgcctttacgactgtcgagcgctgcagcgatcgctcgctccctgcgtgctcggtgttgctggggatctcggggaaacctcgcgcgcgggatgatgttgcgccgacgaccggtccggggtcgtagaggttcaggtcgtgagcggttgatgatgaggaatcacatgcaagatcgagagcaggtcgtgcttcgttatatgaaagagtctgggagggcatataggctgatgtcagatgggtggaagatgtaaagaacccagcagaggctacttgagatcgagcagaatcaccaactagcagtatgactacggcgtctacgaagaaattgggaggccggaccgccatcgtaggtatctcgcaaatgctcatcgctgacgcaaggccgagctcgctgatgtaggtgtttgtcttgcaacattttaggtcggatgcggctcccgaggacagctcttcctgaggggcgtcgtcgacaggatgtccaacccggggaacaaggtcgtcgctttctgtgacatcaaccaggggcgggtgcagtactataacaagcttctccaggagctcgggcaacccgtaagtcgtgctggtagtctttcgagcggcacaaggagctgaacttgagtcccaccgtgtgttgattcatcggacggcagccggccgcagagtacacctttgacgcctttgaagagatgctcgacaaggaatccgtcgaggtgctcgtcgtcacgaccgtcgacgccacgcacgaccagtatatcatccccgcccttcgaagggggatcaaggtcttgaccgaaaaaccgatgacgacggatatagaaaaatcaaaggccatcttgcgtgctgtcaaggagaccgataaccacttgaccgtaactttcgtgagtctgccggtccagctggggacgggtggtacggctcgctgaaatatgctacggggtcgatccccgttggtcgtctctcgcagaactaccgtttcaacccggtccacgagcaagtctacaaacagctcgcctcgggggtcatcggaaggccgataagcgtacactttgaatggctgctcgacaccgtccacggagcggattatttcaggaggtggcacaggctcaaagacaagagcggtggtctcatggtacacaaatcgggccaccatttcgatctcgtaagccccccacccccctcctggtcattccgcggtcggggcgagctgacgtgatcggtgtgggttgtttcaggtcaactggtggttacaatctaccccgaaacgggttttcgggatgggtcgacttggattctatgggcaggagaatggcaagcagagcggctgggcgaaagattacgatcgggctctagggtccgaggccgccaagggggatccgttcgccctccatatcgacgccgacccggtcatgaaggaactgtacgtcgacaacgaaaagtatgacaactaccagagggaccagaacgtctttgcccccggcatcagtaagtagcgcgaaggcgttccaaggaaacctgccttcgatcaagggatggaatggactgacggtcggtcggtcatgcgacgtattttgtagcgatcgaggacgacatgtccgtgctggtacagtacaagaacggcgtgactatgacgtaccacttgaccgcgtattcgccttgggaaggctatagggtcatgtaagtccagcattgctcggatcgtctgtcgagcaggaccaagcctgaccgactccccgaggtataggttcaacggagacaagggcagactggaactcgaggtggtcgagacccagttcagggatctggcggattcgcaaactgtcggaccagggtcgatccatgggactcagtcgtgagtcaaggagagcgcctccgtggtcctcgaaacgtcgtttacttcttgctgacgtctaccgatctttgaatcgacattaggacgccgaacgctggtggagccaagatctcggtccatcctctctggcaaaaaccgtacgagatcccgatgaaggtcgatcacgccggtcacggcggtggggatcgaagactcttgaactcgatctttggtgcagccgatggggaccagaccgaggaagattccacgagcaacatggcagccaacgagatggatggggcttatgcgttggctgtcggattggcagctaatcagtcgttcgtgacgggtcaacaagtggattgcgaggagatgttggccatctgaaagaaagcccaagcgacgtcggattgcgtcgttcaagattgcagaagggagattggaatgccgatctcgatgtattttatcgtcgtcgaaggcgttgtttgtgctttcggagcgaggacaagcaggtcacacgattgtcataccggggcggtagtcaggaagcctcgcctcgctcgggaagtgggtcgggattgtgagagaagacctttgctggaggccggacggattcttgtgttgccgcagccctgaacgataacgtttcatgaagagctgagaagcggggatgttgaccccaattcctgcaacttgatcgtttgttgtttgttatcgtgtgtgcgctgagccctggccgttcggggacttttctggcttctgggcggcggatgactgccaagatcgttcctcttcgaacgccccctttggcgcgcgtgtcggccacttttcgacgccacggcaccagacgatacgtgggttcggttcgatgatgatcatgatgatggccgatcctgttcaaaacaaaaacaccggcgagattgacacgcccaccatgtcacattcacattccgcacaccaccggcttccataggcagcagctaccggggcccattccttcgatctgacctcggtcagtgcaactcggatctccggaatcccggagagtcatggttggtaccttcatctgtcacagcatggacgccgtcggatcgcatgtcggacgacttcttacctcgaccagacggaatgcccattgtttttgcgaggtaccaatgtcgtcgacgccgtccatgtctcagtaaacaagaaagagggcatctgactctagatacataagacatgactacgtcgatggcgagactcgatctctatttcgtcatcgtcaactttcaagcaaagtttcgtcttgctacataatcgactctagtctggcctcgttcccatctcgatatctttccgctcaactacgctctttcgacaactacactcgtttcatatacccaagatcataccgagcccgtgacatactctcaatacatcagcaaaatgaagtaagtcgtcagcccaatgccacagcattttttctctgtttcttaaacacagactaatcgacattatcgcctgtcttcaggacctccgtcatcttgaccactctcaccatgatcggtgctgccgccgctgccgctttcactcccgtcaacagggctcttgcacctcgacagtctgccactctcgacttctgttgtccccccgaggacgctacccccgagggcgtcgtcggattcgtcctcgatcctaacacttctttccctcgctgcgggtgagtatggtcgtccgccatacaagcgaccaaaggcgatgagctgaacagcgaacgatattttggaatgtccaggtatatcgcggacggcgcccctcccgccagctatgagcaggacgccgctttcgaaggcggtaccgctggaggttgtctttacaacgtgagtccagatccacacgtctcccatcaagcattcgcacatctgattcgccttccaaacccgctcgcacaggccgatgggacccttcaggacgaccgaaacgccgggttttgcccccaaaccgccgtttcttgcaccgtcgccaagcgggactttgccgcccgtagactggcggccaggcgtccttcccccaagatggtcaggtccgagatgtcggatgcgctcgtcgccaagcgaggcgtttggaaccagaagaagagggcttgaagattggtcgtctcggtagaccgaatagaattgggctagacgtagatggatagggttgtaacctaatggacgatggactttgctcgtgtttcagtttgagagtatataatatttatcactcgtcggccatgaccccacgataggcaagcgatatcaataatgagatgtactgatgtggatgcaggttgtccaatgcgtcaaatatcccgcccgagctctatgatgttacaaggttgtccccgtctacttgcggcccttgcccttgggtttccccttggccccaccaccgcctccgctcttcttcttgccaccaagtccgacaccgtcactacgaccggctcgcataccctcccggaccgccttgcctcgcttgttattgtccgtctcgaatccgcccttgccgagcgccatcttcttcatcgtcttttcagtctttcttcgcttgctcttcgcatcgacctttttaggttgagactcggtaatcttgacgggtcgagcggcctttttggcggctcggactccagcgtcggcagccttcatgatcccatcagcgtcgtccatctcacgagcgatcttgcgacgtgtctgctttcgcgacaatccctcgtatttgcctcgcttgggctacagtggcgataggcagctcagggtcagcctcgttcacgtgctcggccgatatgttgtggctaagccacttacttggtccgcagcggccttggccttctctttaacttcagggaacgccgagatataggccgacttgctggcctctgttaacagactaagggtgcttagcatacattcatgaaatctgatgtgtatcgatcatcaatcacccttggccttttgcttctccgattcactctggaaccaggttctcttcggtcgaccaaagatctcctcttcatgctcgatcatgttcttccccttggtgacttccatatcggcctgtcgaatggccttttcctccttttcttccttcaagacttcggcgacctcggaacgcagagcttcgagctttttggcgcacgactgaatggccgtgctcgggatcactctgttgtggatctgggacgaagccgactgcttgatggccgccttgagcattcgtcgatcggcttcacctacgagagtgatcgagctgtgtgcatcgcgaaagccggtcagccacgtccatcaagccggatgaactgtttacatgccgactcaccgaccattcctgccagcacgagcggtacgaccgacacgatgcgtgtacgcgctcaattgaccgggcatgtcatagttgatgaccgtctcgactcccttgatatcgagaccacgggaagccaagtctgtcgccaagaggtaatcgacctgtccagctttgaactcttgcagggccgtgagacgctgcgatcgacgaggcgttttcgtccccgatcagttcgggaaattgatccattgtgatacctttgtcccgactacgtacctgttcctgcgtcaagtttccgtgcagctcgctcgccttcaatccgcacagcccaaagacgattctcatctgatgagccaaggccttgctcctgaaaaagatgatacacttgtccttgacggtcctggtgacaagggacaacaacgtggccgctcggactcgatcttccccctgaacagcaccttgttcgtttgaagccgaagcggccgaggccgggttggacctccctcggatcctgacaaactcttggatgaggttctttgccgtcgtccgtttagggtcgacgaaacacctgacgggtcgatctagcgagagtttgacgagctcgtcgatcgagtcggtcatcgtcgccgagaacaacatggtttgtcgtttcttaggacagtttttgatgatctcgttcaactcttgagagaacccgacttcgagcatccggtccgcttcgtcgatgacgaggatatccaacgcgttcagggtgaacgagggagagttgttgatatggtcgatcaatcgacctggagtggcgatgaggatatcaggcaaggtcctgagcgtgtgcgcttgggcactgagggagagacctccgacaagcaaggcgaaacggatcgaatcgagcccggaatgttgaacgagcgatttcccgacgttctcacactggaccgccaattcacgcgtaggacagaggatcaagactcggcacgccgcaccagccttggatttgtcccggtattgcagacgctcgaggatgggaatcaaaaaggcggccgtctttcccgaaccggtgacggcgcttcccaagatgtctcgaccgagcagggcgagcgggatggatcgcgcttgaatgggcgtgggcgtcgacaggttcaaagcggtcagagcgcggagcaaaggtcgtgacaaactcatctgtccgaaagaggtaggtacggtcgggtcgatagtgttattctgggcgtcctttttcaacgtaggatcgctggagaagaaggcgtctttgcgggccttttctgcagcggtctcttcctcggattcggcgtccgagtcggagtctcccgagttcatctgcacgtcgtcctcgtcgtcatcaacctcttcttcggcggaatcgaggtccgaatcggcttcatcttcgtcctcgaacgcttcctcgccgtcgtcgtcttcctcctcgacatcgctctcgacacccatcccgaacccagatccatcgtccgaaacgtcgtccacctccatctcgtcctcctcttcctcttcttcactatcggactcgtcgtcagaaccttcctctgactcttcatcttcgtcatctgaacgttcgccttggtccttgtcggatcgtttacgtttcttggtcttttcacggtgagacaagataggcttgcccgttctccgtgcgatgatatcatccacgttcaagggttgctaaatcatatcaaatccaggattttcaatcagactggtcgactcgcccagccagccaagtgcttgggagattgggatcgggacgtaccagcttgcctccctgaacctgatcatcttgttcccagaaatccacaccgtccccgagcgtctccctcagagccgtcctcgcaccatccaacccggagaaatcgagcgcaaactcatcatccagagcaaactcttcgacgtcttcgggtttcttgttattgccgttgttgttggccgcggttgatgtcgagctggacttggatttggatgggacggcagcctgtttgccgcgtttcgagctcgagggacgcgaggtctcgggttcggaatccgaatcgagggtcaagatgaaatcgtctgccatggctagtagtagtatcagctttgatctttgtgtggagaggctgtgagcattgtgaccattttcgatgttgcaactatctacttctccccgttttacgaggagagagaggtcaaatgttgaaatgagtagatgatcacgtgatgcagttttgagagaatttacatccgaacagcttccgacgatcgagatttacatccgaagctcggttgatatacttccgatgaacccttcccgctcctctatcgagtggaactcacgactcgatcgtggtgacgactgcgaactgcgtctgttcaactcgaccagagcttgtaaagaccatacagtcactgcatcgctagaattccagtcaatatatctacaccatcatgctgtcgaaatcggggcactcgcgatgtaccgctacggctatatatctcttgtcctacctgacctctttcgcaatggcgacctccactcttcgcatcatcacctcgaacgtgcggttcgacgggctctcctctcaaccagtacccattccatctaatggcaccattcagactctacggagacattggacgctcgaggatccatacaaggaaagaccctgggctgaaagaaggtccaggttgacggacgccttgatgttctggggtcccgacgtcataggctttcaagtgagtcgatacgacaagccgacgtcggtacccctacgattacttgacgttgacaactgggaacatcaacgtcaatgccaatcctcaggaagtgcttcacaatcagttgcatgatattcaggtcctgctgggttccgcttgggctcacgtaggcgtaggcagagacgatggaaacgaacgtggagaatacagtccgatcttttacgataggtgagtcggacctgggctcttgggttgtatccattcagatagctgataataccatttcaacatctttgactcggcttggggctgggtagcgaaagatttgagatgatctcgtggggaaccaagtggttatcgaaacaccctaacgaaccgggctctaaagactgggacgctgtcagtggcttcgagactttgaccctagtccccccaccctttttagcagaaactcacactcttacctcttcccaccccctcaatcgcagtctcaaacgaggatagccaccttccttacgctccgcgacaagcgcgcccatcgttcaggacgtcaaagggggaacagagacctcatccatctggtcaacacgcactacgacgatcaaggaaaaaagtcgagagggaaagccagtctgttgatcagagagttcatgcatgggtgggtggagatgaacgaacgacgaggggacggggaagaagaggggttggtcgtctggatgggagatttcagtgagtggaagacggcgatcgatttgaggatggacggaaagaagagctaggattgattgaccctgcccacctgatactgcggggaaaagatgcgccaacggacgatccaaaggagaaaggatacacccatgccgtctcccccgatcctctccctcattcccggggcgacgacatgttcttcctggacatcaggacctccctcgatcgacgtcgagcttcagcggagatagcggggaaatggcggatgaacgcgccgtatggacacaaggggacttatacgggattcaaacagcccgggtgcgaggttgacgacccgatcgatttgatcctcgtcgccagtgcgaggtcaggcgggggtccgaggagaaagaccgcctacaagccttggtccgatcggatcgatcaggaggcactggaagcagacgagccagagcaagtgagaggagggtgggaggtggagaggtatggtgtgatcgataatgttattgcaggacgaggagacgagtcgggctgggtaggaagatggtcagatcatcgggccgttggcgtcgagttgcgaaaattcgactgagtacggcgggattgtttacggacctttttgtctgagttgtttaaaaagcctggctgtacttccctgttgtatagattcggaaatagcctgacagacggaaagtacgtcgaatgccggagaaaggctcgccttctcgacgacaatactatctgctactcttttagcaactgaagaggtacatcgagaaaggcagcgggaagtgtccatagagaaagcaagcaaggggtaggtagtagtagtatcaagcgaagtattgtccgtattgtccatatcacaccaagctcgagcgaagaaagccctgggacaaaaaacctaaagtgaagtctagaaaagagagagagagagagagggagcgagccttagagcgctacgcagacgctgtcgacgagcttaaacccggcgtcacaattgtaggctgatcatgaagacaaaaatgcacgatgagcggttgagacattcaagtgattagtcgaggaatgtaccttgacattgtccagcattgcaagtaaccgacttgacaccgggaaggctcgtgcagtctacaccttcaccattcgatgcgcaacctccacagctgatacggcgcacgatgatcagcggcggaaagggtatcgcatgacaaaatctggtcatcactcacctctcgagctcggtgagggtgtcgatacattcgtaagcccacgagttgtccgacgaggcggtaccgttgaccgaactgtgattgatccgggtccttagtgtctttcccgtccggcctcgatccgaacgcgatcggcttaccatgcttgcaaccttccgggacagtacatggcgttcagctcagattgctggaactcgaattgttcctgctcagccctgagcttcatatcggcctgaacacgctcctcgaccagagccttcttgtggtaatggtggctgttatccttggaaggcttgttgtccttgggaggcttgttgtccttaggcggctcgttgttcctaggcggcttgttatccttgggtgggttgggcttggggttcccagaaggagtcgcggggggttcacagcactgggtgttgtcgttccagtcgtcacctatgatgtcacggagtgaaaagctcggggtgatggcccatagagacgacagaccaggtcggactcacagtcgggagcaggagtgtgaggggtctcgggacgacacttcttggtccacttgcaccaataccatccttcgtatccgaaaacaagtgttacggtcagcatgaaactcggtatcaaaggacctcgtcgactttgagttcgactaaaaggaggagagatcagcccggacgtacctttagggcaagtctttcctttggggcaatctaccttggaaggagtgttgggtacacagtccttcgacctctcgtgccacctgtcacagcgggaacccaagtcgcgtcatcagtgcccgcacagacgacctctatctcttcccaacgacgacgaaactcgtgaagacgtaccactcgttgggcttgcagtgctgtttgttcttggtacacttgttcaagttcgagttccaagtgaaaccttcaccacaatcacactcggtgacttctttaggggggatgcaacatttctcccatttgtgcatgtaccacccgataggacagtcgatatcccggggctgaggacaggcaaaggaagttaaggtattggtggtcagcatacgccaacgatcggatgaggtggatcaaaaggggtcgagcggagcttacgggcgtcttggtcttttcgctacagcagacggctttccccttacctccgatgtaggtgaagaaggatccacgggagctacagtcgtcacgctctttctggggtgctttggaattgccgcatccccagttgatgggctggtggaatcggccccaggtggcggtgacagaggaagctccgaggagggcgacggtgatgagggctttgaatgatggcatcgtcgaggatcagagagtagagtgggactaggtggaggagtagaggagtgtcgattctatcgacgggatgaagtgatcgtggatgtgggtatggtagaacggtcggataagggtcgtcgattccagtcggtcgttgttgtagccgagaagtgggcaagggaatggagtcgccgtttacaagaggacgagaaatgaaaaggggtgaggaggttcgaaccggtcttgatgagaagagaagaagaagaagatggactgggcctgagaaaaagggagtgtccgaaccccgttagtggtcgatgtttatatacatctccagcgttcgccttggaagggatgttgttcgatccacgtcaacagaaaacacagcaatgatcccatcaaaaaaggagaaagaccgaccaacgtgttctcttttccttgccgcctacactcccgttgaatcgtttttgatcgtttagtgacgtttcaacacatattctagcgacacctccactttgctgcctcgctggtaccgcgtgattgatgaaaggaatgtaaatgtgcatggcggcgattcgtctgaaacgctttcggactcctcccgctcacacccctttgacggcaacatcgatcgaggagaaccgtcctttgatgatgacaactgatttcgcgatggccgacaacaaagtgtgaaaaatacatgaaacgcgagtcgggaatctcgatcgattcctctcgtcgctacgccgccggcgaagttgggtaggagccctttgtaacgcccccatctagatcacgcgacaacccgttcattacggttcgtcccgcttttcaatctcacagccaccaacaacccaatcagagatcaggatcagtcgtcatcgatttcgccggacctcttcctcttgttgcgccagacgcccatcaagcttacgagcgaacggtcgtgactggatcgatcgaaacaccaccggtcgagcgcagcaagtcccttcaacgaacaaaagagaagtaccacacgcggattcgtgtgtacgcgtcgccccccagaagcgacaccggatgatcacttccgagtccccatcaagatggtgatcgccatcttggcagagcacaagccaaagagtcgatgcaggtcgaccttagcagcctctccgtcagtgaattgtcttgttgccaagttgagatgagactcggtgggatcgggtccaataatcccgataagaatggtaaactgtcaggctggtgatcggtgtggttcccatcgcgtcggtcgtcctcggtccatagaacagaacagagaatgtccggatcgaactccggctcccggtcatgtcgggacgaagatatctcgcaacacgttgcatcaaggaagaaaattaggcgcgaactcttgcaccgccggacgaggcgtttcaggtttcgccgaataacgagagtggggtctggcatgggcaggatcgagacgttacatccgtcagcaactgaacgtttgaggcgttcattggcgagcccgatcctggtgagcaagtggcctgatcttataacgattcagcctgtcacacacgacgttcaatgaggagagtaggaccgccccgcataacaaacagcggttcacgccggaaatctgaccatgaacgccaaggcgattggcaccgagcacgactgcggatttattacggcatgaccggcatgtcggacttgcccgatgtgccgaactggtggatcatcgtcttcgcttcatcctcggacctcggtcttcatgtggagtgcattctgaagacgtgctcggtacataaagacttggtccggagtataagtacagtaacttgtcaggcgtaaggggttttggtcacgattcccagtcatcgtcaacatcgtcattccacaatacgaatcatgattacaagaacacagcccttgcttgtaagagccggcaatgccgcacaggtccgctcattctggacccacgtcgggggtctgcggaagccattagtggatgcaatacctagcactgcatccaagcccatcttgagcagaggcgggagaaacgtattgttggggatagctatcggttcagcgactgcttggaccgggatgacggtctataccgagtgagcatcctcggacagcaatacaacttccagactgtgacttatcggtacgtcaaaccccagtcttcgacagatacggcacatgtcatctcccgagtatcgggctccagaacaatggaacatcgctactccaggtctctcggcttccgctaattacagaaggcggtacgaacaggctatacatgaggtcaagatgaatatcgcacaagaggtcggggattgggcgatcgggaccgggctgctcctgggaggctacgacaggctctggagggtatgcgagaaggtggcaggatctctcacagcaagttcggggaccatccgcggtcgagtgagttcatgacaaactccttcacatcccgcaatgagaatctcttacctctacccttgaacgcggtcagatgctctcgacgacagttttcggcacatttcttttgttgaccttttcggcctctcaattgggtgtcgccagtctttatcgccattactctggggtagaaactcgaagcctaatgacaggcggtaaagatgtcaccttgttcgcgctcgcgaattactttcacatggaacagaaagacgagcgggaagcaatagagaccttgaccccctggaagttttatgggatcgtcggagtcggactgacaggactcctcgtcggcgctcacgccgcagtgtcaggcctgtatgagcggatagcgaggcgaaagataagcccagtgatcaaagtcttggccgctgtaacgggtcttgggttgtgagtttacatcagcgcgaccgatcatgagcacaagatcggtcctgacctatcctttccgccgaaagtcttgttctttcggtaccgcggtcgactcggcccgcagaacccattcccctcgcgaggtactcggaatggatagaagctcaaggctgcatccctctcaagtcttggagtgatcctcctggcacaaagatggaccctgatctatggtggcgagatattcagacaatctgtggagaggccaaggtcgccgaagtccttgtcgtgcctgacactaggaaaaagggcgaaagattagcgtggctcactcgacacatagagagtccgtgagtggaaggaagggtctcactgctactgagcagcctggactgataaggtcgcgagcaaggacgggcatcaacacttcggaaggactcctgatttgcttgaaggactggcagttgagagagctcgatcatgaccagcatctggcgctcttgggtgggtctatgtcagcttcataaaaagccgcactgctgccgctgacactgaatctcgtcgatcagctgaatcgctgtttacagagcgagaacctgcccaaaggagctggacagcattctgtctcgtgacgaccatactgtccttccccttgatgcaccaactctatgtggccaggccgcaacttttactcgccttcttcccccaactttcgtcagaagcgctcaaacatatcccgctagcaatctcgctggctacgacctctgccttgacggaatttacaagcctgattttcacgtggctcaatagcgaggaggcagaccgcgtgtatgctcaagatcgacgtattgcacaggcgcattgggactgtccatctgggcttcggaaagtcttacaacagagagaacagggcaccttggccgctgccgggaaggaatcgatggattgggatctcggcacaaccgacagattgtatgttcgccgaggcatttttagcttcaaaagtcgtggccgtcgcgagctgatgcagattttcgctgatagctataattcgggatttgcgccgatgacaaccgatcgtatagctgcaatcgatcgagcgatgtaggagagtcaatatcaacgggtctcactctgagagcattaggtcccggcggcaattcaaggccaacacccaattgtcaatccgatcgacagtgacattcgacaacatcattgcttaacattcatcgcctttgctagacgactgaaccccaacgacagaatatccggttcaaccgtgaacgttattcgaaagtagcctgacttgactctggagtgtgtaaccgatccaggaacctgcacagacaagacgtggaagggtaatcagcaactcataaggagactgtcttttttttctggttcaaactcactatatataaccccgcatcgaataaccgacaaaacccatcctcttcatcctcagcagtcgtccaccccatcctcgaacccaggtcgacccataagaaatgccctgcgttcgagggtatcacgtgaaatcccctggcttccagccaactcttggccaactggtaattcgattcgagccgtcgcctattctctctcaggaaccaatcgcggtagcgctccgtaccatctaagctgggttcttccagaagtgcagagaagagacagtcggcagacgacgagaccttcatgaaaagagacagcggcgccatggctttgacgagcagaggatttgttttgtgtaatcagtgcacccagtctatgaggtcttccgagatcagctcctcgcgatgttgaccatacgcatgagaatgtaccttaagccacttgagcaaaaatccttgctgagtccatgcacgacttgcgacgttttgtgagagtacgagtgtgagagcatatcaatataggatgatagaacaggaacctcacatgaattcgacttttgtcgaagggtccgtccagttcctcttcgaggtccaagttcaacacactcttgaactcgggcccgctattccggtctgacaggatgatcgcgatcagacccggtgcagtcaatccggcacgccgcctagacgtaccaccggttgagaacacgctcatcccgtacacttcatccaccactaagtgtagatcgtgctgctcggcgaaacggcagtatgcgagcagggtcgcctttgattctggaaccccaagcaaagacgaaattgacgtcaacgatttcgcttctgatcactttcacagcgcaactcagaacggcttacgcgttctacctgtcgggttgtgcggattgcaaagcatgataactcgcacctgccatgaacagtatcccactccagacatcaaccatcaagatcgaccgcggatcgattcacttcctcacattcatcccgcgctctcgacacctctccaacgccgctccaaaccttgcttttacgtccccttccagtaagatcccgtttggtccctccgccagaggtacaccgacgactaatccttggacccgcttgttaatcatggtgtcgaatccggcataatacggactcgagatgagtacggcatcggacggattaagaagggtgtgatagagctggttgaggatggagtaaatgccgttcccaaggacgaaatggtgctcttcggtcggctggcttggtctccagattctacggggcgaagaagacgtcagcttgaactttcgagacgttgcacggattgtgtgagccaagcagtaaagtggactaactcgttgtagaacgagcacaacgccgtagtcaaacgctttgatgcccagaggtgattaccataggtcagatcctctcttcggaaccattttgcgaaagttgatcgatagaattcggtcagttcttcggcctagggacgaaaagcatctcgttaacttagaattcggccaacgttcgagtagcatcacaaaaactcgcaccatcaaggagttctcagcaacgccaaggttgatcagcccttccggattgtctgccgaatacacattctccaggattcgggatatcctgttcgttcaagccgggagatactaagtgtcgcatagggaacagaacaagtgtcacagatgacctacctcggatgaactttgcttggcttgccgtttctcccgactactgatcgatggctgaacctagagcctcctgcaaggagccacttccccatctcatcctccttcctatccgtttctcctgtaagcttgtcgcgtaaattatcgttctcatccagctctgatatgccgactacctgcagcattgaggagatgggcacactacctccagcgtatccaatgttgagcggacacgtcggcggtacgctaggagtggataagagaggactcggtccgtcataatcaacgaacgtcatatttgaaaggccatagcgctcaacaggggatcctcgatggcacagatgtcgttccggaccaaagagacttatcctgtaccggtgacatcggtgtttataggcaattgtcccttgcgccgcttttttcctcccttggggcagaaatttacgactcgatcgtaggcttatggaatggaatgcatgacgatagcaacaatggaggtgtggaaagaatgtagagcagagtgagtcagagcagaagaaggtttcaagtcacgatggtttctcatttacaggcgctaaggcttcgttagcgccgagtgggtgccgagatctcaagtgccctggaattgatgattaattaaaatcaaaagccacctacgatagtcattacggttgctgcccatttttcccaagaaagagttcccggattccagctcctcacctggggataagccgttcacatcagtctttgtctctctcgcagctaagtttcgattaaatggcggtgcggatgcttcgcgaatcatcgtcgtcggttcgacatcgtgtatagaagtttacctgacacgtaagccagtagtgtactagtatcatgtcgagaaatatttggataccgagcgcgacacaaggaatttgaccgaatatatgtgctctcggtgcgaacagagttcccgctatgtctgccaagtccgcatatcatgacgacccagttgtcgagaatcgacatggtccgattgatcagcgatacggtgcgtctgcccctctgcgaccattgatgtatcttcggaaggctcactaaaacctgactgaataccctgtgatttatagctagtagggcaatttgtcagatggatctgcggaaaccgctgcctgctctacccggatgagcaaactgactttcagctcccggcacggtattcaccttcgaaagagctgcaaaagcaacggagaatgatcaaggcagcgaaagatcacctaaaacaggtctatcagcagaatgagagtcgaccagctcgaattgcccccatcccagtgaattcgtcgattaagctaggtggagcgttcagtcaaagtgacgtcaccctgcgtgatattgaaatgactaccgccagacccgggcagagtcgagagcgagggctggatgcagcggcgcgtgcgttggatatcgatggtgatccggacctggtcgattggtatgattctggtgagttccgcttttcgaatggcggcccgccaacatttcgcgatcaaagtttacgagcagtttgggaaatttaacgtgtatgtgcacagacgatcccgaacgtcctgtgaactggtgagcatagttcgagtacgcaactccagcgcagccctcttaccaaaccaacacgacatttcgtaaggccaacgtggcgaaagtcaatggttgtcctgaatatgatccttctcgtcctggtgcttgatatcgccagcccgatcctatctcctggtatcaaatccatcatggcggaattcagcatcgcccaggtacccgccacgctcggaaccagcgtttatctactaggactcgccgtgggcccgctcatattgagccctatttcggaaatacctagtgtcgggcggacgaagccatacgtcattaccctagccatcttcacgctgttacagattcctaccgctttggtgcgcaattaccctggattgctcgtattacgtttcctgcgagtagtcttgtaatcaattttaagagatcaagacgacgctgatatgtacgtcaacatcgtcacagttctggatttgctgcctccccagccttggctacgggaggtgcaagtatcgccgagtgctttcgtcacgagacccggtcgtatgccctggccatttggagtgagtctgtggtggccagcagatatagaacctgcatgaatcgatgatagttccgggatggccctacagtgatatcaatcgcttcgggacccgctcttacaccaacgatagcgggattcctgattgagagccaaggctggagatggggcttgtgggaggtttgtcggcattccatggattgcatttcgagagcgttttttggctgacggacacaccgtgctcagtgatagatgtcatggtttggttgcttcgtaactgtttggcttgcaattacccttcccgaggtgcgtacgaagccatcattcgatatccttaccctaatagccaataccgaagcagacgaatagtgataacatactgctacggcgtgccaaacggctccgagccaagaccggaagagatttgatgcagagtcaaggagaaatcgatcaatcgacgatgactatgaagagcctccttggcgaaacactcaagagaccactcaaagtcacggtcaccgagccgatcgccatcgcgttgaacatctatcttgtgcgtctgtcaaaatagtcttcctggcgatcacattattaatcagaggaagcaatcgtttagcaacgctctactatattcctggtgtaagactgcttcctcgatgggtcgatagaacgccctaaaatgctgatggatgcgctgctttgattggctcttagtcgaatcgtttccgatcgtctacgaagacatgtacggattcagcatcggaatcggcggtcttccttatctcgccatcctggtaggcagcatgattgcctcgatgggctactgcgcttggatatagtgagagacgagatcatccggaccttgatacgatgaccatacgctcatagcactggtctaccgcacagcttatactacaatccacactataccagatcgggacacaatctgcctcccgaacaacgatggcctcctgccatgttcggcgcattcggatatccagcttgtttgtttttctttgcctggtcagctggtcgtgtccattggatatggccaacagtttctgctgttttcttcggctggggatcgacactcctgttcttagggaacttgatttacctttcggaagcatatggcaaattcgctgccagtgcgttagctagctctgatctgtgtaggacatttctgggtgccatcatgccactcgtgtcgcatggtctattcctcaaccttggtgtgggctggggatgcacgttgctgggttgcatctcgattctgtttataccgattgcgttcgtgttatacaaggtcagtacaggagtaagtcctacggtatgctctgctgaacgcattctacggtatgctctgctgaacgcattctctacagtacggggatgtattacgtgcacgttctaatttagcttgttagaacgggttgtccagcgattaagcgcaaacggatgtcgttggtctggatggaagcgagtagtcgataattgtatctcgctgcttgaatgggtactgcgctgaattggcttgtctccggtgatgtcccacgtatgggaagttcgaaagaacttgtatcgtccttcagccagacatgacgatcggagacctctcgataaatggaaaacctcgggattaccacgcatcgaatctcttggccggtttcgaactctgataaacgacagcgccggacattctctcatcgcatgcggcttgcataagtagcctcgggatatacatccattttatgcatctgacgcttgctcgcagcagtcgtctcaagtcaagttccaatcgtctttgatcatgtctgccgccttttccgctaccatgtagaccgcgccctgcgaaagtgctgggcatgttagtaggcgcctaacaaatcgcgtctaagatgcacttcgactcgcctggggatgtccgtcgacgattagtgggaagatgcttgcatccacaatccttagtccatgaacgccatggacttgcaggcgattgtttaccacgccgccttgttcctgtggcatcattcgacaggtaccacttgcatgccagatggtaatcgatgtgtcggcaatgaatctaggaacgcgcaagctcggtcagtcatccactccccgctgccgaaatgtcaaaaaattacttctcgatatcctcatcactctgtatttgggatccaggcgatacctcaccgtgattgtcaccaatgacgatgtcgcggaacgcagatgtcgcaagaagctctctcaacctgtgaaaggatcgcaatgcgaccgccttgtcatctgtcgaccccaggaactgaatgtatgacgagcctgaatgaagagtgggtaacttcttgacgcatcaagccgaatactcacgttagggttgatgacaggggcgtccgaaatggtactggatcgtaaagtgacatttcctctcgatgtcggggcgatcacggctgcagtcagcgaaatgtaagattggtttggaaatggaggatataattgcgtatcgacagcgggaaagtagtcggtctcgatgaggtattccacgatcgaagtattggttcgattgagcaatccctccgcgccgatcgatctcagggtggaactattcaattgctcaaaggcaaagctcggaccgataggcgtattcaacggtcctccaaaggacttgaagtactcctcctgcgcggcctgtagcttggcataattccgaaagacgctagtgtgggatgagttttcgcgagcggtggcgatgatgctgaagtatgtgtgatcctgcatgctatacgaattgaagcacagggcgtgagctgcggtgccggcatcagatattgcagcgagcggggcgtactgctgtccgatattggcaatctcgagctgcaagggaatgcctaccttgtccagctcgctcttgggtccgataccctgtgccgatcatcgaaaggctcagttggatcataccgtctaggtttcgttcctttgccctgcacttgccgacaacatcaaaacctggggaggtttgtatcgcccccgcggataagatcacctcgtgattcgccgacacgttgatcgtcatgcccgaggcgatatcgttataaacaactcctgtagctgagagacttccgttcagattttgcttgacgatgatcgattgaacctgagctctggtggcaacatgaaggttggttctgttttccgctggcacgtagtatgcatcgtaggaagacgccctgcggaatccgtctgacgtaaatggctccctcttagccccaacgttcgtcccgttgttgagctctggattgtagggaataccgatctctcccatcccttcgacgaatgcgttggcggaatcaaagacgtaatcggcataggctaccggaagaggtccgtcgggcgagtaggcattagggtcaaactccgcgtacaaagtgccgttaggtgatggaggcacgaatctcgtgctctagagatgggtcggtttcagcttcgatcatgagattgctgcctggctcgctgcacttaccttgcgaaagtaggggtacacctcgtcccaagtccaccctagatttcccattccagcccaccgatcgtaaattccaggagaacctcgcatataagtcaagccattgatggcactacttccccccaagcatcgtcctcctgcataacgagatcggtatcaatcggtcgctgctatcacatgctatcgcgcaaaagatgacattgtagacactgacggttataagtgatctgtcgatcatccagtccggcttggggtgcagttacgaatccccaatcgatggaagagcctgggcgcagcgtgtggcggcaagaaagtcgatattttgatcatcctagcttgttcctctcaaaagactcaccaaggacctgctgattcgcgcctggaggctgataagcgctgacctcggtcgggtttgttccatcctccaatacgactacggtcgagttggtttccgtcagacgattggcaagaacgaggccggcggtgcctcctccgacaatgacgaagtcataggaagacgcgaccgacgtcgagttggcagctcgtctggtgaaacgggccgtgtttgaagcgctctgaagcggaaaagctgagcttgtcgtcgacaacaaggcgagtgcaaagcaaaaggggagggcgatatctttatgcatattacgtgatcggcgacctgtcgtcggaaaattcgagggctcgctgtgcttgaagaatccaaagcattgcttacaggaaatgctgatttgcacctacttgcttcacgctgtctgtctaaatacttcttgaatttcacttggcccatgtcattcgtcagcaactcttcttcctacacatcgttcggataagaatctatccattcgacgtctcgattgccctaccacgtaacgtggcgtttcattaaatgactcgcgtgtttcgtcagggttgaagccacatcgacgtgccgcaacgccaaacgacgcctatgacgagagcgaaatcacagctaacgcgaacaaggcgacccgaagcagttcagcgcgctacaacccgctgggaagggtactggtaccaagcggcttcgtcgtgattcccaggatgaacgagctcgatgactggggagtattttgtatctcaaagagtgtctcgaaataccaggcccagtcacatttcgcagggccgcagcgatgactacggattgggcatagtgttgcgctccgaaatcgatatgttatatgcgctcatcgtaccagcgatacaagaaaggaccccgcccgagacaagcccatgtttccccaaaagtcgccactacgaaaactcccatttctagactgcgagatgatgcccaaatgtagccgaccgtcgatctaggtgacggtgatgacctgcccgttggaatctttgaggacgacgatatcacaagggatcacctcgttggaatcgtaatagctaacgtgcgtctgatccagcgggtcggtcctgcaatgtcgaacgagatagagtcagcgtgtcgcatcgcgtttgaaagatgaagatcgggcataggacgagcaggacgatggatgactcacttgatccccatcttctccatccaactccgaccgagtacgacgtcaaagttggcctcttcgctgatcatgaccgtatgtttctcggtcttgctcccgacggtgatcgggagttgaccgaggttgacgagtccggcatagccgtaggttcccatggccgactgcgtgggggtcgaggtacggtcgacgggtcagataagccctgtaccacgacgtgaggagaggcggtggacccgggactcacgttcttggggatcaagccggatcgagtggcaaacggtctcgagacatagacgtgtcggtaacccaatttgatcaacatccggactactcccacatcacccgcacgtacacgcccacccacaaccgaccggatcagcctcgccgtccaatctgatctgcatttcccccccttggaaagaaaaaggggcggctcgattcgactcaccttccttgaccccaccgatactcccgacgacggtcctcacccccctcccctcgtggaaagccttccatttcctcttatgcttgtcacccaacgtctccccctcgaccgcatcctcgtcgtcgtcctcgtaaccccggatcgcgcccgtcgtcgggtggacggatttcggacgggaggtcgtcatcgtcgatcgggtggaacgcgctccacgggatttaggggcagaggggaggagaaagtccgaggtgggggtttgggattgggtttgagagttggattgagtgttggcgtgggtctgcgtggtggtggtattgtgggtatgctcgtggacgggtttttccggggtcaacgtcttgacatgtccacctgccgtcacaccgtcgctcttcctaaccttgctcggggtggaggaagacttgttcaagatcccgttgggcttcttttcccgagaagcgggaggggacgagtagagcgagttggagggttgttgcccgccgttgttggagaacgaggaagagttcttgggcggggtcaggtggagcgtgatcgagggggtctcgtcgaccgggtaacgggacaacatgatctccaggtcgtcgtctagtcacggtgaacggacgcacgaaggacaagcatgcacgcacggggatcacgaccacaacgcctcgtcagctttgtctcctcgccgaacattgacaatgggcgacattcgaatccgagccgatactgaccgtcctgcaaggtccacctcccaccctcgtactcgtattgcaacaatccaccatcccgaccgtccttgacacccgctcgggccttttcgtccaacccggatttacggactatccggtcgatcagccccgaggatgattcgttttctgtcggtgcggcggcgtcagggttcggcgaagtaggtcggggtagaggaggaagagcgacctggacgtcagtgccatgggatgagaggaactggcacggcgagaaagggctctttcggacttacttcggtacggcaatgcgtacgaatgagctggggtatggatgttgagaatgaggggcatgatgggcaagatgtcgagtgcggtttgagtatagctagctactcgtgggtgtgatggcagtgagtagcagagttgaggtgtagtatagcaagttgttcatgggttgcatatggtgtatgtcgtgcccatgttcgtcccgagtgactctgcgtgttggatcgccgaaagcgggaagaaacagaatccgcgggacgtcatcgacccatcgacaagggggacacgttgattcatcgaccaccacgtctaaccattcatcatgcacagacacactactgattctcaactactactactaatactactactgatccatgtcaggtctgttctggcatcatcgggcagcctcgacagccttggcagcggcctcgtcgagtccatctatgtagcgatcgaggggaaggtcggccgtcagccctctctcgcgcgcgcgggcgggaggagaactcgagactcaaacttaccaaaggggaaaatcttgagcccgctctccttgatcatgctattcgtccccaggaccgccgaacccaacgtcagctctcgttcaagactttctgcaccgcctcgtcgcctcgctactcacgccttggcttcggcctctttggtaccttgcagacggacgatgagggggatggtcaattgcaactctttagtcgccttgatgataccctcggcgatcacgtcgcatcgcatgattccaccgactgcaagaccaagtccccaccccggggcatagcatcagctcggagacacgcgcatgtttgaacggcgcgggagaggacgcacaaatgttgacaaagatcgacttgacctttttctcggtcaagagcagctcgaaagccttcttgacggcctcggcggtggcaccacctccaacgtccaaaaagttggcagggtcacccccgttgagcttgagcacgtccatcgtggccatggcaagtccggcaccgttgacgaggcatccaatgttgccgtccagcttgataaagttgagaccgtactgtgcgaggttcgagtcgatcggcagtgtcagcgagaacgatcggtgtaggtcgtcgtcagtcctgaacgtccccgctcgacactcacctcggcggcttcgacctcctgagggtcttcctgggtggtatcacgcagcttgaagacgtccttttgacggaaatcggcattgtcgtcgaacccgaacttggcgtccatactgtcgggtcgtcacggcgcaacacaaacacgcacgtaagcatgggcgggagggaacaaggatgatcatgggggtcagcgaggcgcgcacgtcgtatacccggaaagaaagacgcgggtgctcaccaaaggaccttgccatccgacatttcggacaacgggttgatctcgatctgagtcgcatccttgtccttgaagatcttgtacaatttcccaaacacatccgccgcgttctccctggcggcctgctcgaacccgagtttctcggccagggcgatcccttgttcacgcgagatgccatggtcgaaatccaactcggtggtgatgatcgcttccggggtatcgtgtgcgacttcctcaatgttcatacccccctgagaagaggtgacgaggacgggacaccccctagcccggtccaagaggatcgcagcgtagtattccttctgaggaggaagtcgctcggccagcatcacggcgttgcaaggtcgaccgccagctccggtctgcttggtgatcaaactcgaacccaacatcttgctagcgtattccttggcctgggcggcagtgtctaccatctgaacaccaccttggaacccgttggaaaagtgtcccttgcctcgaccgccagcgaggacttgggccttgatgacgagggattgggaggggaacgacgaggcgacggattcggcctcttcagccgaaaaggcgggtttcgagaccggcgtagggatgtcatactgtcatgagggtccgcgtcgaggtcgggacggggatgccaagttggacgacggggtcatcaaattgtgaggggaaagaggatcagctcgacacgtcccgggagaatagcccactttgtttggggtcacgacggatgctcaccgagttcaagagctggaccgactggtactcgtggatggacaacgctcgggcttgctgtttctgcaagtttcgagccgagacggcgggctagggtcgaacgaggaagaagtgttaagtgccggggttgcagccaaaaagtgtagacgccaaacgacgactcactcggatggccgacctggacgctttaagggattgagagaacatggtcgaggattgtcttaggacgggacggtggtgtatggtgtaggaagtgagcggtgtggtgtgatctatcgagaccaagagttgggaagaagacgatgggatatatgctcgaggaccgaggtaggatgctgggatgattgtggtgacagctccgttgagacgggaatgaaagccgactaaccccgtatagacaacggacatgtaaacacagggcatgacacggacattgacttatgctgatgtccgtgaactcgccatacctattgatgtccgcgtttgactacgtcatcactattttcctcccaaaatagcgtggcccgggcgccgcggcaatctccggcgcgagcacacgccaaacgggtgagtaggtgcacatcatcgcgcattaaccacttattacaccatctcattctcatcctcaccataaagacctcgtcactcctctcttgaaaaactctcttgaatccccatcgtgaaccaacttgtcgacatctcaaagaaaagcaacgatgaccacctcgagcattaccgcagaagcgaaaaaggcaggggaaaagctcgccggcaaggtcgtccccctcaccccgactttcggcgtcaaggattgtgagttacagccgtcctgacattcatgcaaacgctcaggggaacgagctgacaagaggaaccgatgaactttttgctggtagattcgacctttttcttggcaggtcagtggtcggcaatgtgacggacttgataggaagaggggtggtcgaaccgaaacggctgacgtgtagaccttgtctccctcgtgtgattgcggtcggacggtaataggggcgctatgttgtacgatgtgagtcagaatctcttataccagctgctccccttgttgaatgagcgattcacaagctgaccttgcatcatctgtgggtctgcattcggtcgatagtacgcatggagcgatgactcgtgagtctctcaatctcgcagagccctgccggacgagaatcgacaagctgacgaggttctgtacacgcgacgatagctatcgatgtcgtcaagagtgagtacccggcatcatcgtcctggtgctagcttgccaacgaaagagacgcttaacgcccatcgtccatcttcaccggccccacttgcccatgatacgacagcccggatccagatcgatcctaaaatggcccggcaatccatgctcaccgccggtcgctcgatcatcgccaacgaaggtcccaagggtctcctcacaggtttcggacccaccgcggcgggttacctcgtccaaggaggcgccaaattcgcagggtacgagttttggaagaagcagttggtcgaaatggtaggaagtcaagaggcagcggtggaacaccgtacggcgatctatctcgtcggagccagtgttgccgagtgagtctctcggcccgagcgtgaacatcaatacggcgctgatcaggcatgcggggtggacaggttctttgcggacatcttgttggcgcctctcgaggcgaccaggattcgacttgtctcggaccccaaggtaagcgtttcttctcgaccgaaatcatcccgacgcgcgacgttgacgccgagacgctaaacccgtctgttgactcggatgtagtacgctaccgggctagcctcggggttcgccaagctcagcgcggaagaagggttcgcagggctctacgctgggttcttgcccctcatctgcaaacaaatcccatacgccatcggacaggtgagtcaggcagatccgtcgaatccccccgctggttttctctctgattgtgcttgttctcgatccgctatcccggcatccggcgtagttcacggtcaacgagttttgccacgagctcgccctcaagggcatgaccgaggaggaaaaggcaaacttgggcgggatgaaaaagttggggatcgatcttgggagcggaatcaccgccggtgccgcggcggccatcctctcgcacgtgagtccccggtcgcgtctcgctgtcccctcttgcccctcgcaacaggatcggatcactagactgacctgcacatcttcgacaacgttccgacagcccgccgactcgatgttgtctgccgtcaacaagggagcggggcctaaaggacccatgtacaagcgtctgattcaagtcggtggggaactagggttcagcggactctgggctggactgggccccaggatcggtgagtgcgaagtactacggccttgagcgtgtcgagtgatgtccggaggctgattggatgacgacgcagtcatgaccgctggactcgtcacaggccagttcctgatctacggttggatcaaggacgccttgaacgcgccccccggcgtggaaatccacaaggaggaaaagtaggtttcgatctaccgtcgaggtagaccgctgtgaacaagaatcaggatgttctgctccgaagttgtcgtattcgcattagatgaggctggatgtgagattatcaatataatggctgcgctcgccgtgaccaagtatcggtggattccttcccagcgcatgtcggtactagtgaccaccgaaaaggcgcgaaatgtctgtaaagcgtttccgagggctgccgcgatgcccgaacccgagagcgccgggtccgagttgcgtcgtctgcgtgtgtccattggagttaggtccgagacctctgggtctacaaatgaccaggctcgaaagcgtcttctgcacacgaccgtaggcatacaagcgtctgcttgcctgcccacgctctggcttgatctggccaaaaccattgatctacatccgggcgtcgatccacctctcgacttcacttcgcttgactaccttgtcttgtatgggagtgatgagggcaagctcaaagagtggcagcgaagaaagagactgttcggttgtggcacgcgagattttgcacacgtccctgagcggaatttgcgcgacttttgtattacaatgtcccggtcgtgatttggtcgagagaatggacgaagatagatcagtatcgtaggatgaagcagtgcctaatctttacgagtgtcaataaggcggaaaggactagaccctgtaggggggtatcatcaaagatcttgaagatcatcatcttaaatgcagagaaggaagtctgaaagaggcggcgagctgagatcatgccagaccgatttgtattctgattgatacaatcaatgctatcatgatacagtgcatggactgacaccgcccgctctaggccttcaaaccaggcgtctcgtcgattcggaagaccagcttctttgcgctgactttaccctcctgcagccgcctcaacccttcctctactccggccaacccaccggggacgacctcgtgaggatgaggctcgaatcgaccgtcagcgagccatcgaccgatcaaacgatagtaggccgaggcgaggtcctgcaggtgaggcgccccgttatgagcatcaccgaccatggtccgcacgaccttgatacgagtggcagtctcttgctccttgacttcgaggacagtcgtatggattccaccgtcagcgagaacctgatcgatatgtgcgacggaatcgccctcggagatggcatcgtaggcgcgctcgagctttttgccgttcagagcggttttgatatcggcgacgacgttgttcttgcgataatcgacgacatggtcggccccgatcgaacgcgcgaactctccgcctgacccggcgaccgcaatgatagggtgaatattcgctagcttggccagcttaatcgtgaaagcaccgacggcagaggaccctccgtataccaataaaggcacgtcctccttggctggggcaagcggggtaggcagctgaagtcgatcaaacattccgatgacggcggtcattgcagctagaggtaaagtggcggcctgttcgaacgatgtcgactcgggaatgtggaacgtggtatggctaggtgccaagctgtactgagcgaacgatccatgatcgctgaccatgacgtggaaagctgccactcggtcacccttcttgaactcggtgacgttcttgccgaccttggcgatgcgtccagcgatatcatctcccgagttgtgggcctttccgacaagtggagggactgccaacgtgagggagcgtttctcagtcgagatgattcgtcaagtcgggcgaagctgcactcacgcttccagtctttcgggttcgaaccgctcacgacgacctcgatcaagacatcatcagcaccaggttcactggcggataggaaagggacttcggatcaaagctgctcgtgctgacaccgtgcatttttttaagactgacgggataggggcgtccacgatctcgacagagatgggctccatcattttgcccttgatgccgctgacaatggcagacttttgggtagacgacatgttcgataacaatgtgagttttgtgcttcgcaactagagaagttgaagaaccaggtcgagtggcgagtggagctgatatagattagtgaacaattgggttgaggaactatatagtcgtcacccctcctgatcacaatgtggagggcgagccggatatgacaaagatgagtttcggaagcaaatgacgcgtcatctgctgccacgctaggatggaatccacatcatgtcagccatcaacttggtttcagagattcctgatcaggtcggccgaatcaacaatctgtagttagcaaacccgtcttgagtgttcgaatattgtgtgaatccccaagcgatgggacgaccgcggcgggcggcggtgactcagagcggttgagagcaaacgcataaaacaaagttggacgaatgtttcggggaaaacagaggagttgccgagacaagtcccgctctggtcaaggggatgtcatggtcggcaaatgccttcaatgcccacgagaatcgatccgcatatcctataaccagacagaggggtttccttggccagagaggagagggaaatttgagacgagcctcactaaaggtctcgaagcggatctcggtccctatccaaatcttgttgaagagctccgctggagtggccctaagaatgtcgtaacaatattccgtcgggctgcaaaggaaagcgtaaaacccggcaatgacgagacgagtctccttggacaaccggctgtcggggaaacaggccagagaatggtcatgggccactgagaagctacgtggactgtcgtcctcgttgccagatccgttctgtggcctcagccatggcccatagcaattagaccactggctgaccacatcggtcagacaatattgccaatcatctcattccagctggggaggactccaagacactgtgttatgcgtgcgcacgttaccaggtcctaccagctagtcaacagccgaggccgaccaaagggcgggacgaagcttcggagagctgagcccagcgaaacagcagaatcaaggagtctatcagcctgtccttcaattcgcttgcccttcactgatcaggatacggaaatgtccctaacaatcgcgagtcggatcagtgctctggcttcgataaaaaggatcacctgactatcacaacaaactaggatgcctcgagagtgaaaaagcgggaggacagctcggcaggaaacgcctgtccaaccatcgtatcagttaaagcggtaatatgatgattataagagcatacgatcatgcaacgagaatgcctggcgaattcgatacagttcaaagccacaatcgactacgatctcagtcacttcctacgcgaaatgatctagaaatgaggccctcgtccgttggggttaccaccgtgttcaccagcgatggtgctgttcgaatcgacatcgggtccttgctccttgtcagtaaccttggcgggttgcgcggactatggccaaggcatgattagctacttgaagagtgatgagcactgagatgcgaagacttacgtggtgcaggtagaaccagtagagggaaaatccgatcaaccagcctccgacgatgttcccgatcaaggctccgaggacgtccctgtgatcgttttaacgtcagccaaccgaaccctgatttccggcacatcatcgacgactcacttccagatgtagacggcgaccgaggggttcttgttgagcatcataccgctgatatcacccgcaggccgatcagtccgattgtacaaaggtctcagtgactcgatgaaggcgcggagactcacagagggatgacaaacatatcggcgacaacgtgctcgaactgcgagacgactgattcgcccactcgtatcagccctctgctcatgtctgcgcgcaatcctcgtatacgactcaccgaaagcggacaagacaaagtagataccaaagaccttgccgacgagatcgctgctcatctgggcgacgaacacggcgaggcagaccatgatgttacacccgatacctcgcaggaagacctgatgccactccaatgcgccccgggtagccgcggtgttggtgacaaagttctcgacgggaccggtggccaagccagagtacttgatgaggatcgcaccgaaaaagagggatccggcgaggtttccccagactatcgtcgaccgtcatatcgcggtcagcccctggttctgtctagatgtccctctgattcgactcacagacgacaaagtagttgtaaggcaatccccaccaaggaatcctgcctttgacgactcccaacaacatgatcatcatgtccgaggtcaagagctccgctccgatcagcacaatcctgtacgatgccgcaacgtcatagatcgaaaagatcagcgccagtccatgtaggtcgggtgatcagacaaagacttgcaagctcagaccgacggggaagacgagtccttcgacaagtcgcagaagaccgggctgtcattgcgaataggggtaatccaccgatcagcgccggatcctgatcgtctcagtgctaccagaattcgatcttacgttgttctcattggcagatggcgagcctccaacgacggattgaaggaaccctccgtacgacaagaggatacctccccagacggcctgtagcgatgttcgacgagttcacgtcagcatcccgctgcctggcacgcgaaacgggcagagccttagctggagacttgccttgaggaacaagacgtctattcgttggtggtgacgtgccacggcgctctctacgagtgcctcacacgtctctgtcggggacaggatcgaactgacatgttgaggcgaaggcgattggggcttgtagccgttgtggttcttctcgtggtagtgaatcattttgatgcgggttgatcaaggccgtccgattcaaattacaagctcgaattggtatagcggcgatgggatcggtcgcatagacttcttgcctctgaaggtcgtctttattatatctgggctggctagactcggcgacgacaacgtcaaccgctctggatctcagcttgaccggacttggacgataattttgctggggatcgggagcagcgaaatgtaaacgtcatcgccctccgcggccaggaatagcccagcccaggtcggtcacgatgcgggggagggaggtagggagagacatgaacctcgtcattcggcaggcgtcacccccttgcgcaccttccataaacaacacacagtgggaatgtccccccggcgattgagccgaggtcacgagcggatgagcgaatggtaacatcatctggtggttgtacccgtccatgctggccatgctgcatgctggtcatgaaaagtatacgttcgaatgaatcccacgagacccgccgaacacgcgcgcgtgcactgagcaccgcttgttcccgatcctcatctacatgacccccggatctcgaactagacgagacgagatccactcgggacacttgcccccctcgattcacggggagccggaacgactcgttcacttcttgaccccgaacacgctcaagagcgcaaacaccccgtacaacagaccgacagggtaggctaccaagaaccgctgatggtccatccgcaggatcgtcacaaagatccccgaggccgagtaggtgcaccagatgatgctcagcgaggacaagaggtagcccaaggggtggctatcgtcgtcataagcacagtcacagggacgagcgagaagagacacggtttggtcgtataacatgatcagctcgtcgaatgactctgatgccaacctcgctttcgacggcaacgacttactcgatccccacgcccatccccaccccgcccagaccgaccatcggtaagagacaataccccaacacgcttgccgtcctgtaagcgtctatcccgcgatcgctcatcagattgagcaagaggtagatggcagtcgtacccaagagggcgaccccgtagatgtaagagaattgaggtttgccggactgtgggttaaagtccagagtgatgtggggtatgcgagatgtgtagtagaggtcggatgggtggaggtagtccgagcgatgggatcgtcggtatgaggtcgaccatgtagatcagccgatcaaggtgtagatgaggtcgtcaggtacgaagatgatgaccagtatgccacgcatccacacgccaggtatcaaacgaaaggaaaaaccccgagaagtagataatctgagatcagcgacctctctccccctatacggcatatccgtatcaagacccaaatcccgagtgtgactgaccaggagcaagaccaaggcgaacccgaaacagaagacgaacggcccggccaaatccgcatcgtccatgatgtccggtgaagggcgtctgagcggattgaggaccgtcagggatttggcgaggatgtgactggggttgataccgatttctgaggtgcgagagcgggaggggggaaggataggtgagtcgggggttgggatccccctcagtatcaccctccccgtcccggcctcgatgtcatctcaaaccctgttcggatccatccacccgtcagatctgtccaggtactttcaagtggaaggatccatcccttcccattcgctcgacgcgctggaattccactgggccgagagggagacgcaggaagggagggtggacaagggggaaagggtcaggaaggtcggtaggtacatctacgtcgtcaccgtcaagggggataagaacggagggatgagggtagagagggaggtcgagcttgttccccaggagacgagttaggatcgtcgatgttagaatggcggattggacgcgcgggtatcggttatgcatacatgttaatggtactaggagtgtctgtacgtcctcggcctccgaacgatgagaagtctttggtgtgagaacaggtgatatttcaaacgaggagcacgcagcaggtcatcaagcatgacctgaacccctatttctacttacttgttatgtcgagtcggatgtagcccataaatcaaatctaaccatgggtacaccctctgtccacagaaccctctgcgcacagtatcataaaaacccactccgtgacagagatactggagcgggagaggaaggaacagcggaggaaatgttgacggagaagtcagtcgagtcgacgtgcagccagctagtaggtgggagtgcccagtacgaacctgcgacttagttttatccctctctcgctctcgtagtgctcgaaaatcggtacccaaacgagaacgtctgcatggggatgccgatctcgagagacgtgaaatcgatgctgctgataccaatgaacggctactctgctcggtatggcgctggaagtgtgtcaaacggaatacaggtgctaaagctacgtgcgttcggtaaaagtctgacccgcggtaccgagattccaactcgatttacaagatcttattcttcgtccgtctagactcggtcggcattcttgtgatgctggcaaaggacgaacgcttggatcagcagctcacacgtatcaccacattctgttcacagcccggtctaggtacaaggccctgtatccgggtgcaggacgtctgtcactgtcgaccttcgtctcggcaagccttttttgagatcttcgattcaatgttcattcatctggaaggtgctaccatcaacgattgtgccaaaagatccagcacgactatttcgtcaaccccgccaacgtgaaaaaagtcgcggtgtaatcaaatatgtgaaacgtttcagcccgcgcggcggctccgatcacaagcattccgacccctcctttcaggcttggccctcttcaggaaaactctgtttcgaatcgaggaatcgcatataagagaagatggcttgtggatccaaggtggctgcgctttggttcaagatcgtccgctcgtcagacacgatctcatcccgctccggacctcatcactcaacccactcctttcctcgtcaaactcgctcagtgtgcatctaatcttcctcttcacagctctcgtcacctcggctcacgccttacctcacggcaagccggccttcatctctcgcgaccacgaagaaggccccggcaaggagcacgatctcctcccccgcggagattcgaactgtacgaacggttccagcttgactcgagagcttgcaacaggcggtctcttcgaaggtccgcgtgacccgcatgtcaactatatcaacagtcataacgacgaggtacagagcgtaccgctggtcagtatccgtgcgtgcagcatacgagtttcttcttcgtcctgacgtcaacgccttgacgtccagttcaatgcgctggatcacaacatcacctccatagaggtcgatctctggctccatgaagtatgcagcggggcaacagcacctagctgcgggccggaggacgttccgattgaagcgaatttattggtcgggcatatccaagaggatcttgatccggaaaggtctttcaagaaactctatatcgacccgttggttcagatcttgaagggtgtggatactcccaaaccacaaggtccgggctggaacggcatctttttcaacaagggtgcaccgggggagactctagttctgatgctggatcttgtaagcgattaaaaaagtattcaccagctcatgctgatgccttttgcgcataatcgtagaagcaaaaaactccgcaaatctgggccgcgctcgtcaaggagctccagcccctatacgacgcaaattacctgacccgctttatgaggaatcaaggcgctacgaacatcacggacggtcagctcatcctcggacctttgacggtcattggtaccggctatactcccaccggcgaggtggtccccatgaacccgcgattcatcttcaaggacggtccactgatggtcatcgatcagcccatcgagaacatatacaattcagtttggaatgggaacccggacgataaaacgcccatccagtggcatccttacatctcgcctacggcttccgacgcgatcgacaagtctttcaccaacggattcacagagacggtcaaggagggcatgaagaacgccgctcgcgccgctcaggccaaagggattcagacccggtggtggggtataggccagtcctgggcttgggggacggcctactcgttgcagaaagaactcggagcggactggttgcatgcggataatctcgacgacgccgtcgcattcgaacaggatcggttgcgaagtctatccaccgaatgtctgccggagactggtaaccagtagaatccttagtgtataaagctcgtgatgaagtagtctccgatatacaaatgcccgaaccagttctcgaacatacccccgaccttgtgcctcatcgccccatccatccaccatcgacaacgaccgtttccccactgatataatcgctcgcccgactggcaaggaacacgacggctccctcgaaatcgctcggtgcaccccatcgctgggcagggatacgttccatgatctgtcgagatcggatcgggttggcgatcagagcctcgttcatgtccgtggcgatgtagccaggggcgatcgagttgatgttgattcccttggacgcccactcgttcgacatggccttgacctgcgggcacgatatggtcacgttttcagttgcgaatttcagaaagcgctcaagatatggacgacccgcttacgataccggcgacaccgtgcttcgccgcagcgtaagcaggtacggtcattccacctggataacgtctcggtagagtcagctatcatctcgcttactggtaatcctttccacttctcccgggaactgaccttgataactcaacagactggcaacgttaataatcttgccccggcccctgccttcatagtccgcagagctggcttgcgaggggacggattcccccgatacgcctccccgagtggtaagcatgtgtttgccaaagtctcgagagatggtaaagactgtcgagaggttgacttgaaggacctataaatttgaatcgcagaagtatcggatttctgatcagcggagagggatgaagaagagtgaaccggaagggctattacacacctcgtcccagtcctcatcaggaaagttctcagcaggcgtccgtcgttggatccctccgcagttgaccacgatatcgacgaccaagctcaacccgccctcggactcgcttccagtgaccttcttgcacagacccttgacttgagctttgtcggaaagatcacactctacgatgtctacctttcgaccgagggcgaagaccttgtcccgggtgtcggtgttcggggtcgaggtggctcgttgaacgaggacgatgttggctccggcttgggcgagagcgagagtcatagtctgaccgatacctcgagtacctgtgaaaaagttcatcagctttgaaggtatagtgcgggattgcgatgaagacttacctcccgtgatcagggccgtcttgccctgcaggccgaagagcgaggtgaggtattcatttccggaagacatgatcgcagcaatggtgtgaagagttttgagatcctaggtattgctattcacatactacgagatgtctcgcgcaattgcagggtcaaagacctgaagtacttgcaagttgttgtagccatacgctactctttgcacaaacagatgctatcgctacaacgctccggtccgaactctccggtccgcgatcaagcgcagatccgcgcgagtgtgcgcttttactgtgtgatcgccacgatgatgaatgtcggcatcgagtctcggcatctcatatgccggcaatccctccacgcgctgactaaaggttcccaccgccatccaaagataatccccgaggaacaatcggccaatttccccccgttcaacatcttcgcctccccaatcatagaagttgtgatgtcaaaccacagacgaatgccatatcgaccctgatcgatacactgccggatgcgaatcttcttgaagatcggttcgactttattcatcatcatcttggctctactggccgatcggtttatgagaccacggacgttgctatcctccttgattcgatctagctatctcaaggctcgcacctcaccgattactccggcttctcccgcttcagcgttcttgttctccacgtctgttatcgcaccaattacaacctctaccgcatctctacttgaaaagatgggcaggacacgggagtctacattagccgccggcaagaccgacgccgagctgacggatcgggaaaagaaagaatggaatcacttggccgacatgatggaacggtaccacaaccatttcaaacacaactttcacgccatctaccaggtaagccgtcggaacttcattacgggggtcatttctgccaccaaagaagggcctggttggtgcaacgacgctgacttctcccgcccgtcctggttgcgagggaatagaacgctgacaaatatcaaaagggaggaaacgcactaagacggttcttgcaagaatcacaggggctgtataggagcttggatatgcatcatcgaatagtacgtattccgcatcccggccctatgctttctcggatcgccgtcctgtgaggttccgtatagctgacctctcgacccggcatgctcgttctggccttaccaggaggaagcctactttttcccattgttggctaagcgcatgccccagtttaaagccggggcgagggagagcggggaacatctcaagagccacaaggctatacacgatggcaagtctcaactcgttgcctcctttcaccttggtttatcgagctgatcgtccatttcttcggcatcatttccaaactcgataggtatcgagacctacgcgtcattgttgctcaaatacgcctcggacccgaatacgtactctgccgaggaattgcgggggaacatggactcgtggcgagaggtactattcaggcatctggacgaggaggtggaggatctagggtggaaacggatgagagaggctgggtttactttggaggagatcagggcgttcccagagtaagctcgggaggctggaatagagaagaagggaggcgggaggtagatagcgagggttacaagggtttgtgagttgtaagatcgatactattacatacggttccagagtgaatcgagtgagaggttccagccgcagggccgtcatgttacaggcttcgttcgtcgccaaatggcatctcgctgattcagggaagacctgacataccgctgctgtccaaatgacttcagctttcctcgcgatcagggtgatcgacgtgcgtaccgcgttagcgctgatatcatcgagcttgtcaagactggcaaactcctttggtgtttacttaagatctggctagctcgatggctcgagagttaacgtgcggcacctcttgactatcgattgagcgtatgggcaattcgttctgctcatcgcggtcctttttaccttgctgtgtgatgctgatgaaccaggggctgtgatgaaacgcgcgcgcaagtcgtcgcgtttctctcttgtgccctcgagaaggatagaagattttgatgagatccgctgttgtcacaccgtttgtcatcaaatgttgagatcaaacccataaagtcccatcaaattgatcgaatcacttgatcaagtccatcaatcgagtttcggttcaaaaacacgttgcctgtccggaaaagtcgtcgacttcctcctcgtgatcaacagctcgtcgtcgattcgtttctcgttcttcatgacgacttgagaacgtatttgaactcgcaacactctaaccctctctggttgctgagacgcttcaagaagctatagtgacagccgaacagtctgttccaatcacctttccaagatccagaacacattagacttctccctccagcaatcgtctgaccgacctacgatgaggggctggggagccgaacccaacacggtcgacaggtccgagtttgaccccaaccaagcacctcccccgcattatcgtcggacctctcaacaacaacatcctcaaattcttcagcatcaacatcctttgccccctcatccgggtatgccgagagactcctccttgaggcacatttctgcctcatcgtcctccggtctcgcggggccgatgggaggaggaccagctgtaggaggctaccaagtgaccggcagagaggggagacaaccgggaggttggaccagcagatctccatcctacggtctgcaagtgggaagaggacaaggtcgtggtggacctggaggcagagggaggcagcacggggaatcgtccaggaggaactttgccggagatggcagatcgaagggagaagcagtgggggttctccatgcggtagagctgggaaggatcgtttcgggatgggaagaaggagagtctacgggtgtgtccgagagtgccgaccatcgagcggttgatgcgactggaagcaccagcgaggctgatgcgaaagcgtacgtcgagctgaccctggcgaatgacacgaaagagagccaagacagtgcggacgatacatctgcccgaccacctactactcgaccggtttcgcaagatcaaaccaatatcgccgaacaagcttggaacacccatcatcctgcaccggccgaagacccggtcgacctctggcgttccgacgctacggcttctaagccgcccaccgaagctcgattcgccccctcataccctcacacctgggacaatccacaccgtaacactttcaactcttctcgctctcgacccccctacaatggatccagcagaagggaggaatacaaggctggcatcaggagcaaaattgagagcttggaggatgaggaaaagcctgcctttgccaaggcgaaggagaagaccagagtggacgatggttggggcgccacgcccgtgggagatgaggagaggaagatggaaggggatcctcaaccgaaagactccgagggtctgatagggggtcaggctgacggctggggggttgcggtcgccgaggaagctggagtaggcagcggtccgatggaagccaattcgaagcttttcggacccgccagtctggccgctcagagtctcgacccagggaccatcacagagactgaaggtgcgcggagctcgacgggccatacgttgcatggtgatgtagcgagaagaattccagatgctgggtggggcaaacgcgggagaggtgctaggagagtcagttcaggtagagatttacgacaggaggacgacagcggaaaggagccgacggcgtcacccgacccggtggcaaacgtcgtattatccgttcaccaggccgatgaaactactcctagaccttctcatgcaccgctggacctgatcgagccggatgcttccgttgctgtcgaaccgtctgaaagagcggatgtcacgccagcgccatctagtcctgccgagatcggaccacagcagccggccacaagcgattacccagctcacactcgtttgttgacgatcgcggtgaacgaccttcggccctcggtccatgaagtcagcatgcaacagttgaaacgggtcggccacaagcaggatcgagcggattacgtagcggactggaagcggtctcaagcgatcgaggccaggggggaagaccgagactgggaggagaagagcttgtctagcgagggtccgagtagggcgccctccagaaggggtcgaggggctaccaaggcgccgcctatcatggatcacaacggttctccggtcgttgtcgcattgccacaagtcaacaagaggaaacccatcgaaggcgggagaaaatacgcgcgggacgaaacgaagtgtttggaaggttccgtcggaagcggcatgtcggggtacgaagctcagccggacgaaaatcctgcgaccatcgtcagagggacgagcttcgatgggatctgggattcagtcccaatcgatccatccgaagaggatgccgtcaaagacggtgatctgggacccgcgacgattgagacaaatatgactgggaccaagcggtcgcctcgcagtgaaaacaaaatcgtcgtacgcctgcccactccgaagagctcgcccctgccaagcttggccggaagcgaccacgttccatctcccctcattcaaatcgctgtgttggaacatgatgaagtgagtggatcgtatcttacaccaccgagtgcgtcactgtaagcgcaaagctgattggtacccatctgatagcccatctcacaaattcctgccctgacggaagacgtgagtattagcccggacctcattcaaagtgtgcttggcctccagacctttgatattccacctcaaatgccccccaaggataccgaacccagcgatgcagtgaagatcctagcggaaacgttgcaggtgcggaccgatcgctgcccgtcagaggcatgttctagctgactaataattattccgctctcagaatactacatcgcccacggacattcacgctcgagttgcatcgagtgataccgtggtcccaactgaaagaccaaaaacctatccactttccgaaacccagaagtctgccgtctccgcgcccgccttcattcctcgctcacactcaagcctgggatcgctgccattagaaaaggtgatcattccgctggacgatctcagcgatgtggagagcgcatccgaagagatcggcgttaggtccatcaggaaagagatcattgatcttcccgatgtatctcccgtgtcagcctacaatcacgcgcacatctcgccttcggtactgtggttcaaacgccaacccggcatcaggtcggctgtcataccggaacggcggttgccggatatttccccagatatgcttcgttactctcctctggcaaattccaatgagatgctcctacaacagcaaaacaacccgtcgcgatatcacaatcatcccaacgacgagctggtacatagaaagcaacaggctcagcctggaccgacgaaatgggaactgaagatggagaatctgttgcacaatatctcttctaggcagtcgcacaacgagagcaacaatcaggaaatacgattactgagacaagaagtggctagccttcagcagcatctccaagaagctcgtcatcgcgcctacgcgtcccagagcgctgtcgccgagaagcaatcccacctagagcaactgagcactaggatcggggaaagcgcacgaacagcacagatgtatgagggctcccttgccgcgagaaacgcagaccttgcctattgtcgggggaggattgagcatttggagagtatactgttggccaaccaaaaatacatcgcagacttgcaaatcaaggttagcgctctccgaacctgatcccagcttgttgacgctgaggcaaatgggctgtgcaggtatcagaggcaacgcaaccaaaaaagggaagcgacaaagcagaggaccgtactcgcagtacacttgagcggatcgtagagctgcaacgtcaaagtctcgtgagtgtcattgtcttctcggccacgttggtaacgaagctcgaatccatttccttgacaggaccaagggaagaagaccgagctgaacctcgccgatagcgtgaggaagttgcaagtcactctcgaagccgccagacgcgaggatgtggatcaggctcggcagcatgagaatcgggcggccaacctcaaagaacgcgggttgcaattggatgtcagagaagtaagcaatcaaggtttgcacagggcgcgagcactgttgatgaccccccccccctcccctcggtgaattgtaggccaattttctactcacgcaagccgaaagcgagagagattactacaagcgattggcaaaagacctccatgaccagttgaaagagaacaagtcaaagccacgaaccgtctttgatatcgaccccaatcagccaggcttcattgagacgacttacaactcggaccatcctacttcttccttcggccacccgggcgaaccttcgcggttcggcatgccagacacgccgccgaagtcgactctcatcagcgatttatgcgaatttaccagatgaacgagacgtttcctcatgatctatacacgtagcgacgatgcatcctagagagtagtctcaaacatcagtgtaaatagctattggacctttccgagacgatgttgcagattcaaatcctctgaaaggaagtgttcacgactcgatgtctagattagaatatctcggcaatgggctacatttcgacgcgtacacgggttcagtaatgggggcatcattgggggatctcgatcacatcataactaggtcgggggttgggtcaggactggtccggtgggagggccaggagctgtctcccgaatggctgttgaaagacagggatacgttcagccggccgtaaacgcacctcgagatcccacgttgtcgactcacgtatctcggaagtagcagaagcaaatgagtcttggctcgctatcgaggcggtcgccgcgtgcctcgtgctctcgacaggcgagatcggattgctctgggcagccagacccgaaacctgcgaagcgccagtgttcgatcgcgctggtcggccggtcgtagggggctcctgcgataccgccgagctctcggcaaagatgaactctttgaccgcgcggagcaattctgacgggtctttcgacagtctgtcaccagacagagttgcaaacgtgagctcattgtgttccttccaaaccggtctgctacctcgacttactggtccaggttcagcttgggcatccatttgtctccgacaggctggaagaaccgttgtcgatgcgtctgtccgctttgttcccgtcgtcgggccatctctcgctgaccatcctctacctttgcctttgcctcggttgcagcgtccatatcggacgccttgatagcggcggtcaaatcggcccattgtctgtcagattggtaaaccagaatgaaagattgcaggttcaattcccggtcccattgcgtcgctcgggggttcatgaacctcgatcgagcgactcaccgtctactctcattggcctcctgctgatcttccggcaagaccgtcttgggcctcacctgcgccctcgtcgcgtcgaacaaggtctgtctcttgccgcccttgtccttgaactccatgaccgagtcccaatgccccgtaatctctccggcagatccctcgggacccctgacgtggccagcgatggcgttgtacccgcccgagatccatcctttggtcttccattcgatatcacacgagtagtgggtagcaggacaggtgacgatggtgctgtccccgagttcgagcatcatcttgccgaacaagatcccccgggcaaacatgttgggcatctgtgcgtcgaagaaacatcgtaccgaccccggtcagtgcgacgagttcggaatcggggaagccggagccgaatcgaggacttgccgtcaaagtgtactcgccatcctctggcctgtcgagcaacctcactcggttctcaccctccatgatcgtagctaccgagttgcccaaaaacttggactgtacgaacagcacacgtgcgaccggtagatgcgggtggatggacgggtcagccactgacgacgatataggcggacgattatgatctgtggactgaccttgggtttcagctctccggtgacgacgatcccgttctgcggggaagtatagaagaatgccgagatgggctaccaatccccaccaagtaaatccatatgagcatccttccgatctccctcccaacgccccgagcgccggggtcgtccatgtccatggagaaggtacactcacgggatgatgagagacttgctccgagatgaagaatccctcggacccgtcttcgtaggtgtaagtgcatcggaagaattcaccgaggacgggattgtacctgtaacgagcatccgtaaaatcgaatccccatcgagatggtctcgtcagatgatatcgaatgggataaggatcggatcaatggtcttacggcttcttgacactgagagacccgacgtttgatcacggtaatgcgaggacgagcaagaagaggatgcgtgtatcagcgctggatccatcgaccgatcccgggtttgctcccggacgcaccctttgggtttgatatgccatccagcgaggatcagagcggtcacttgtaaaaacctctgtttaggatcctggatctgtccggctctaccagcagcgagcgaaagaggtgcggggggttgtcaaacgccggtcagccttctcgttcagtaaggcgggcacgcatgagggggggaggcaagcgtacttgaacatgagttccgggtgggccatgaaatcggtgatccgttcgaggagcgagcggggttcgagaacaaaggtggggaatgtaatcttttgcaggtccataccgatcctcactaggcgggtggggaagaaatgataatggcattgacatgaccgagggcgggtgcgtgaacgtggttgtcagttagccacacttgctcactctttcgccgccgccatggactcaaaggtatgcccgtccaaacgacctcgagactcacgttgactgatcatggcagagagtacgctgccttcctctttatccaagacttcgatatcgtcgggtttaccatccggtgcttgacccctatcgggactcgccggtggtccgccggtatggctggcatcggaacctcgacgacggatggcgtcggtcgcccctgaaagcaaacccatagtagcaggttagatgggataaggtgtgatggttcgatgagcttgaaagctattgtcctccaagtgatgatggtagtgttattggttgggttgtagactatagatgcaaacttgttgcctgcgctaccactgcactggctggcatatgacgtatcgagggcgacatcatcatcatcaagttgcaagttgactggcgcgcgatcagtctcggctcaacaaatcaatcatccccgtcgttccccgtcgtatcatcggcaacagagagagagagtgagtgatgtttcgcatcttacgaggaagagcgaacggccgtcggtattacgtagatcctacatcgtgcatggtagcctgtagcctgtggcaaacgtatgccctccgggctacagtggtgttcaatgacatccgggacgggccccgcgaagtcacgaaaaaaaggcaatccgcgagccgtcggagggtagtcgactcgacgcgctagcatgaaactctcgcaacctctagaggaacctgctgcatagccttgtcccgtttgcctctcgatatccagccgggtgtttatgcagagacataaagaagacgagcggctaagttcactccgtctatggacagtacccatcgaactttttaacaggttagatcactcctttctgacccgggtggtccttactccgcacgcttcctctcaaggcgtttaatggaggccttgtgtcgtggcatgccccagtgtcttcagagcggcacctcaggttgtctcacaaccgactggcagcaattccgtctctgtggagtatcgagagtcacatagccttgcctcatttaaggcgaatagacattttgaacacaataccgctcaaaagagaagcaggcggataagcagcgttagcagagcgaagattcacggtggttcatccgatctgaagatgcgcctctaatgggaaaggctgatttccccggaagatggtttcgcttctagctcgtgatcttcttcgaccggtattttaccccttgttatggtaaggagagatcgaatagacctcggctctcagacacatcacgatatcattgcgatcgagaccggtaagtctttgtataggttcaggggcaagtccgagataagagacaggatatcgggtctatttgaccttgcagaaattttgtgacgttttgacaagaggttttgaacgcatactcgtgcctgaactttcgacttgtttgtacgagtacaagacgtatcaatgttgtttaggtagctcaattgggggtcaagtcattcttttcggacggcgtgtcaggaccaatttaccatccttcttctccacctgttcctttgctttagatcgggcgtccgggggaggagtgctcgatccagaagatgagctctttttctttggattcgggcttcgtgccaagagatccagtaaggaaggttgtgatccggatcgactggccggtttcttcccttctttggagggtggttcgagagtcatcgtggttattttttcgctcaacatcttggtactcagaggacggccggacttcgccgggccaagagttctgaagcgacggttcttgctcgaggcgttctccagctcttgcttgactgttttgcactttttcttcagataattcagctcgtccgcttggatcggttcgatagacgccttggatttatgccgagactggacgctagcggggatttccgatgcatttgaaacgatgcggtcgataatttcagtcacactggagtcgatcctgcccgaatcatctgggctactgccacgcagagtgtgtctcgcccgctcgaggatttgacgacacctctccaccgtgtcccccgggaaggccgtctcgtcagtgatcgaggccgtataatcgccatccttccaagctggcgagggaatggtcagtctcacgtgattatatgagtgtaccggtagtgcccactgataaactcttccagagacgcggcgagcccctgtccagtactaggtgggacagtcagctccatgatgcagatcgcgtgacaggcaaaatgttctcctcgaattaaccgacaagtattgccctaggtcacccttattagtagtaagagtagtgacaagacacgacggcttcattaccccctgaccaatagacattacattgaattcctttgatctctgaatctccgctgctattaattgcacaaccatgggcccagcatggagagttgaaggacgtaacgactggtagatagaggggtagagcctgtgggtcacgcctctacaagatcgatgggcgaattgcgagttcgaatatgctgggggtaccgatcgaactcagttcttgcctggcctaagactttctcggtcatggagttccatgagacaacagcagagccgacttgtacagatgtggttcgccctcgtctcgaacatatatcttgacgagtagctgttctcatttctttgactgtgagagaatcttaatcctgtttatggagagggaggagcaggacagggacagaacggttgctgaccaccctagcgagcgacatgtaagatcctttcgaacgtctggctgctcggcaaggtatacacttcatctccccgcgagagcccgcatctatcaccgcttccttacagcgtgtagtctgtgtacgcggtatactggttgatcatggaaattttgcgctttatagaacaaatccaaacaagtctatcgaacggaactattattgctaagactcctggtcagatgtgtacagacagaaccgggccccacagaaggaggctcaacggcaagggtaccattttcgacgaggctgctcactgcagaattggattctgaacgtcgatgagcattcatacttgtcagtgtatttgcaaatttcaaatgattgagtgagccagccaggctgacaaacgaacgccttcgcctactagatttgctgggctgagtgacgctcgaaggattttcctccgccccccttccatcaggcggtgtgatgctgacgatgggagatcgaagagaagcctccttggctaggataatgtctagtacctccctctgctttatcctcttagggtcggtcctgcaatattgtatcgatttgatttcccgagaagccttagatagctcattcttggtcaaagacggatgagcgggagggtgtatccaagttccgtacgagtgcgtgttcttgctgcttgtctgcgccgaggtttctgggtcgacactgccaatggatctgatcggactgttcgtcgctgacgagatcacataacgagccgtcggaatccgtttcgaatccaagagcgtagaaaggagaaaattggtttccccttgagtgtaaaaatcatcaacagatgacccatcgcgatctggccgacgcaaggtgtaggtcctctcgatcctctccatgagcggcattctttccctcgctaacttttgaacctcttccacgaattcgcaaacgcaatgaaaacagctgcaagactcgccctctgcattgccctctacagggggaaaccggaacgtttccgtctttgcaggaccccctttggtacatgtccagtcgaaatcgatcgattcgtcgggatcggttccgtcgctctcgttcttgctcatctcgatgcgtcgcaaaatgttcgtggctctagaacggatcctacgagtcctggcgcagaattcgcccaggtcacgcaccagtcgccggtacacaagcaatgtctcgcactgactggaccggtattgaaaattcctgccctcttcctcggccttcgcgagacagttcttgcacaactttgtcttgccttgcctatccgatccattttcgcaaacctggaaatccttgaaatcattgcagccggatgcatgttccttccgcctccaccattcgagccgctttcgacctgttatggaagggagcttcaggataggacgtgtatctacagactgtgaacagcgaaatctgcattaccttgagtgagcaacaagcgcaatgcatcgagctcgtcctggatggggaccggtggttcgactggctagacggaatgttcatttctggttgccgcctcaccccctattccgtcattgaatatgatggttggcgctttgcttgaatttgtggagattatgacactttgtaccgaatctttgcgaccggaaccgataggtctgcgttgcggtatggaccggtacgagtcagccatgcgcaagctccttgatgatcgcgttctctccgctcaatctatctcgcctctgctcccttttccaccttttgcttgtggcttatagccacttaccagctgtatgttctgggaaggagttctcaagccgaccagctgatcacctcctttgtaggtatgaaacgatcacgctccgatcagaggcatcaattcacacctagactcttgcctctcgacagtatcgcgagggcgacgaggtcgcagcgccatcggggcgaatgggattgacttttcggtgcttttgatcgggtggatcgaaaagttcccgtcgagggcgaggcgtttgtatcacgcggggtccccccaacattggtgcctttttctcgcctgcgccgccttccttctagcgtcgatccattctggcgtcactgatgctgcgcgcgtttgttgtgcaaatgaacgggactagttcgatcacattctcgcccttgccgaccgactgtaagttggcttgggtttactggtgccaacggccacggacggagttccgtaacgacgtctggcgttcttttccaggtccgaagatcgtcgtagctcctgtgatggccatggcggggtcgtacgagctcactgcaccgggttctgcaacgctttcgctccagcctgcctcgacccggtgttattgtcatcctcggacgccctgagtcgggattgccggtggtaccccaccagttcccgaaatgacaacaagccaggaaaaaggaatggtcgagatgcatctctttcggtcggtcggtcagcttcgttcgatcaaactgatttgatcagacgatacccgtctactgagctactgctccttgattctcgcgtttcaatccaactataattctcatttcataggttgatacgctgctatttgtgagccacccccttgaaactttataaagcatcagctgacggcctacgtccgtgccaaggcattcgatcgcggtctttctctaagtcggcccccataatatatagcagtacaaacaacaccataaataccgagccggggtccccttgttctcgagcaacatcagtaaccatcgaactccggtacatctcgacgacagcattacgactatcgaaccggaccatcattcaacagcgacaccatgagcggcatcacatccgcaccaaactctccccagaagacccggctcgaacctccacgaaagggcaggttcggtggaggctggactcgaagccttacgaacctgcgtaaagaggcccaacaatcgcaacccgtattcgataataatggttcgggattggccggtacacggaaacccggctcggagactgctagtcgaccgaccgttcgcccggctgtcaaatcgagcttgagcactacggccatccctaccccccctgttcatagcaagatgataccgacaacgatcccggcggcatcatccacccccgctccgaaaggcttgagggcgttctttcagtcccacttcaaacggagcgtgtccacccctgcgcccatccggagtgagaaatctccgcttgcgactcctaggtcgaccgggttgacagagagatcgagctcgacaggatcgaaggaacggatcgcacacgaagaaatcatcgagaaggaagacattgttgatccctcggtacgacaggaagaggatgtacccgtgcctctgctcgaaccggtagacatcgagacatcgcaaaagaaggaggtggacccggcgtcgatcccgctgccaccgtcaccctcgctccgacctgtcagcccacccctcatccctctcgccgatcccatcgccgacggatcggccgagactgaacgtctcgcccgagccacctcgaaagagtctaatgaggtcccctcgctattcctccccgacaaagaagaggaagccggaccggacagcgcgatggagggagagttggtcacgcccgtgaacagcttggaattggctggcgttcaggggttggttaagatcatgtcgaccgagaggatcgaggaggaagaggaagacgaggaggacgagctggacgcaagggagaaatcgcgagcggatgagatcaagcggttgcaaccgcaattgtcagtgcagcctctcttaacgcaaggacagatggagacggatcagactcgaccccgaccaacggtcgatacgacgtccccgactttgacgaggaacggaagtagcatgaacttgggttcttcagcgaggggaacgagcgcctcgagtatgagcaggaccccggtctctggtcgagagaggtcgcctgtcgatttcaacgggaatgcgaacggagcgcggtatggccagggttctcagggtcaacattcaccacaagagcaccagcatcgtggacgacaacaatactatcaacaacagcagcagcagcagcaacagcaacagcagcagcggcaacaacaccaaccacaacagcagtatcaatcattctcgccatcgacggcttccggtacccagagtttaggaaggagcgggagcagacaggttcgacaaagtacttatgggttgaacaaggtgagtctggtcgagatgacttggaacccgacttctgagcccccgcttcggttgtcgacggctaacctttgaatccgtcctcccgcctcccgatcgcagctcgccatccctcaatccctctcatccagaaactcgcgctcgcccagtcagaaacgaatgagcgtatcgcctacgatgtatacgatgggaggggtcttcgtcgaggcggaagagattgcggataccgacgagaagaggttgaccgaggccatgttctgttcgtgaacgccggcgcgtcttttttttgcgcggaacaaaaccataggaatttcgaggaattttgcataagttgcacgtgtatatgaattcgagttgtatgcattattgtaagagtggaattctatgtcgcatttgtatacacacacacacattgacaatttgccaaaaggccaagaccatgacctagcttggagcaatgtctgtctgtgtgtctgcgtgtgtggttctcggggggttacccggtccggtgcattccggttttgccggatttagcgcgcagggtcatccggttgcaggaggaaaggagcggaacactgtacactggacatgtcaaacgaaggagcaaactcgaagtatataaaccgttcacaccatcatcgccatcatcgtcgtcgtctacaccgcagcagccggctcgtatcacactgaatatcagccccaatcaacctacactgaaagaaatctgacgaaaacgagacaaaatggtccaaaccgaattcaagctcaacaccggtgctaccagtatgtcgtcatttgatctcgttgatgccttttgtcgctgttgagggcagcactgactcgactctcgctttgcaccagtccccgctgtcgccttgggatcatggcaatgtgagcactttgcgctcaaagatcaccctactaaaacgcacacatgctacatgctgacatctcggtgcttccgcctacaatcacagccggtcccggtgaagtcgcccaggctgtcgaggctgccatcaagtgcggctaccgtcacatcgacggagccttcatgtacaagaacgaagaggagctcggtcaggggatcaagaagtcggggatcgataggtcggaattgttcatcaccaccaagttgtggtcgacttaccaccgaaaccccgaagcctgtttggacgagagcttgaagaagctcgggaccgattatgtcgacctctacttgatgcagtacgtcgtcgtcgtccttcgggcctgagcatagcttgttccgggtcgtctgacgaaaatcctctctatctgatcaccgtagctggcctgttcccctgaaccccaacggaaacgtgagcaccgccggctttcagtcctcctcgagcgaaccttcactgactgctccccccgctcaatcctttcaggacccttacctccccactcgacccgacggttcccgtgacctcgataccgagtcctggtcatacatcaagacgtggcaagccatggaaaagctcgtctctaccggcaaagtcaaggcgatcggcgtatccaactgctccatcgcctacctcgaggagatcttgaaggtcgctactgtcgtccccgcttgtgaccagatggaggtgcacgttttgaacccagagttgaagttgaacgagtactgtaagagcaaggggtgagtcgatggattcggtcgtcgtgccggctaggtcgtggttcgtatgtgttggctgaacatgtcaaattggtcgtgctctttccccccaccggtaggatcgtgctccaggcgtattctcctctcggatcgaccgggtcgcccttgatgaaggaacagatcgtacaggatatcgccaagaagcacgatatcgaggccggaaacgtcttgctgtcctacctcaacaaccgagggatcgtcggtgagtcaccgaccgtcgccgtgtgatcgacccctcaataaggtattgaccgaccccatccccatgccaccctcagtccttcctaaatcggtcaccccctcgaggattgagaagaacctcaagctcgttgacctcgacaaggaggatatcgaggcgttgaacaagtttgccaaggattcgggcaagttgaagaggttctgcaaccctccttggggagtcgatttcaaggtgcgtcgccgtgtgcggctagttgggtcgggcgggaaacagagagaaagaggaatggagaggctgatgcacctttgtttttcgctgttgcggtccgattccggtgttgaacagtgggacgagcagatctagtcgacggggctttatagatggaaaaaaaggatcggcgacgcactttgttttgtacatttcgtcaattagcatacatggtcgtcattattgtcattattgaataacatcgacattcgtgtttcgagaatgacagatggcaatgacctgctcgtgtgctactttcgactgttccgttgactccggcgattgtcgcttaatggcgcgccgagtcccggttactcggagcaggtaggcagacactcactccatgcatgcatgtatatcgacgacaagacatcgggaaccaattcgatcgtatacagactacttagcgatcgacccgctgcaaggtcctctctcccaatcgactcccgtagtcacccatcaaagatggaacggaaagacgcggacgatccatatcgacagggaacgggggaagcgtctgcctggaagaggacgacgagaccgctcacgagggccgaacggatcaagatcgggcagatagtcagattgcacctgaaggtgtttcttggcagtctaggtctgttgcaagctctcggcgctgtaggacggtaagtcccgctccgacaagatgtgaacaagagtcacgccagactgatcgaccggctatgggtgtgcaacacagcgagtcgaggaaatccctctcgaacatgctcaagaccctgctcaaaccgctcgagaagaacgtccggacggccatcttcctctctctctatccgaccctctttaggttgttcaaccttgctcgtgcacgatcgcgctcggactcgaggcagagcaaggactcgttggacatttcgatcccttccgcttcgatcctgggcgagtcggaacaagatcgatcgaggctcgtcgccctcctcagaaccttggtcttgccgacaaacccagcgttcttactcgctccactctgcgtactcttgcccataaattggttgtctcagctcaacctctactcgacgaccgccgccgggttggctttggccaaatacatttcggaaaagatcgataggagggaattgagctggaaaccctcttgggccagcccgccgagccttgagagatctagacgacatcgaccttactggatgggggagcgggatcgggcgtcgttgtcctcagacgagctggataggcttgccaaggaggagcaggacgacgaccctgacagaggggacgtcctcgtcacgctccgagacgctatccgggctggaggagcatggtggttgttccctctcagtcaaggatggttgttgtacaccgccgtctttgaaggagactgtttccctacgagttacaagaacgtcatcgtctcggcaagtccaacctggcgattcaaatgaaaacgtcgtccgacatgctaatctcttgcatcaatgtagcgctcgacccgatacgtcccgacagctcaatccctgggtctttcgggtgagatggccaaatccattccccacccttcttccatcctttccctcttccccgttttcacccaatcaccccacccacacccggccttcccgcttcccatcgcgccgggggtggagaagcagtatgaatccttcatgaccatcttccgatccgctcatccggcacacgaccgggcgatgtgtgcggcactccatccgatggaacccagctgcgtcaagaattacgtgagggccgttggggatgcggtgcccagtgcggcagggttggtaggtggatggagcgggttggtaaccttgttgagatggaagtcggtcagcaaaaagtgagcaaaatcccgaggaatgccatgcgatgcggatcaggggatcgacaaagttgactcgacttggacgacggtcattagtccctctgcagcgctgtttaaatggctcaagtcgacagcgagggggacagctttgatcgccttgtctatcagtacagcttgggtaggtcacgacgtttggctcaagtcacgatcttttagctgatgattctcgccaaataccaggcctgggtctgcgctttccagaggatcctcgcacctacaacgatacctaaagctaggtgagtagggaggcatccgatcgctttcagcatcgattgacaaggtcaatttgttacagattctcgatcggggggatgctggccgggtgttggatcttgctcgttccctcgtcgcgccgcctcgaattgggcatgtacactttcaggcttagcttggccagtatgtggaaggtcggcctgaagaagggctggtggaagtaccgagcgtgagtctgcctgcaatgtcatcgtcccggtgctagacactttttcaagctgagagtcacgatggtcctttcgataggtcggcaaggtttttgccttttgccctcgccgtgactctcttgacgtggatcaagcgacggtcacctagcgtggtagacggttgggtagggcgcacggtcaaatatcttgaccaggatgcggaagttcagatcgagcaggagaccatcgcatgaggtggttagacttgggatgtgctgtaagctcgtatatttgagcaacagaaccagcaatgtggcgacaatatacgatttgacaaagacagtcacgttttcttcgtggtgtatatcctgcctttgattagcttgggacaactatgagcagccggcgccgcacttaaagaggaagaggaagacgaggtgggtcaaacgccgaagcaagtatgaacgtgatcaacaggaatgtctgctacagaaagaaaattgaatcccatgatgcagtcgctcgcctattgacaagataaagaaggaacggttccagtaactcccctcggcgcacacggagggagcgtcctgttcctatgacagtcgcgattcgagaaacagtagtatcgcagcagtcgcttttacggggataaattgtcgcgcacgaagggaacttcctttccattcagccaatatctggggtcagtaattgagaggtgtcatcgttgctggttgtcagacgacggttctcgaaccagcgaaagctaaggagacgatcatgcagccttgtcgcgctgaagtgccgaaatcttgctgaagatcgttgtaatgcgcaaggttgccatccctcggctccgagtcaatctcgttcattggaaccgatgcaccatgggtactcattggttcaggtaagtcatctgcatatccatcgcgggacacgtctcttcggaccatgtgctgtaatgctaccgtactgatcgataagagcctcctcggcccacgatgggagcatgccggtctatgtcagtgatgatcagtgcctgagcgcctacgacccgggtgatccagagtcgagcacagtgttgagaacgtcgaaccgggctgaagactctctacatggcacacaagccaggatcacactactcgacgattgaggcgctggggaatgttcatggggactcgagagaacgtcccaaactcaactgagatctcagggttgacaagatcatctcccattcttttccgtgtgcgaacttcattctatgcggcatgctagacgagacaggggcggtatacaacgagagatcccggcgaccagccgagatcgacaagagggatgacgagaagatcgagtggagggtgagattagcgagtcggtggttggtgatggtgcgcctctgatcctggtgggtaagggaagacgccaacgggacgtcgagcaagagttttgtgttgcccgacatctagtgcggtgtaggcttgtggccatccacgtacctaatacaaagaggtgtcaaggtcagtgcgggtccaaggtgatgaagataagaagagtcgggcacggcggcattgcttacatattccgggtagcagaggggagggtggctaccattccgtccacatccttggtcagcttgacctgacatcctaggcgggacctacgagtaggagcagtgcaagacgtcagccgcggtagaacggtcgacctcgccactcaaatcctttcttgtcaggggctgaccttccactcacgtatcgctcaacccgaaagccagatccagcatatcattctcatcatcctccggctcttccagcttgtcgtaactctcggcatcgaggatgacatgacatgtggagcaggcgatcgagccttcacaggcaccttcgaggtcgacgtcccattcgtgagcgagggagaggaggtcgtccccctcgttgccttctacttgagtgacggtctggcccttggcgtcctggaacgtgatcttgatgctggtaagatggagggacagataaaggagatacccagaagttaaaaccgtattattaaaaaccgaatagggaaggtaatgcgctcaccctgttcccggggcaggtcgttcgatatcaccgtgcttggccactacgatcgatgcagaacaagatcagcgactattccaaccagctttatcgatctaaatcgaatggcaagaacttaccagcactcgtctggaaacttcgcaccgccatctgctgtacccgcgagggtaaccccacgctcgagctcgaagtcggtaggctcgtgcgaaacgatcggatgactgatgtcgagctggaagagctcggggtgggggcgagcgccttgcggagaaccgggacgacggatcgtactgttgatcgtgcaaacatttcgttcgtgcctctagatgtttgatgcagctcgtggtgtgagattgggagtgagagagggctctgtcgcaatggagacgttgattgatgagatcggtgcacggtgtgcgacttttggaccgccaataaggcgatgagcgattaaagtcggcggtttatgcgttttcgtttgttaactttgccggttttatgcgttttcttgtcgcggcttcccagcgttgttgtgggtgggtggtgcttgcatgaatgatgccgtcattttcatgtcgaaatgtaaacaaaccgggaattagaagggcaggagagacaggagggattagagccaagtagcaggtagagatcgagacatcatcatcatcatcatcatcagttgatcagttgaacgatcaggtctaccaggtcaatcatttagagtcaaccttggctaggaactttagaagagatatagaaccaatctacaaccctgagtcaagacaaacttgagcagttaccggcattcaagagaacgaattcaaactcgatcgaagaccctattggacacgacagccatcttgatcttcatcacgtttgccgtgtttgttattgtttgatcaacattcctgatcaatcgacttttgaaacacgaacccaacgcacgagcagcacttcgacgcccgaggtgatcttgatatacggcaaacaacagcgcactcgacctgcatatcaaccatcatgcccccagcttcaaacccatcctcggataacccgtccaccttggcaaccatgttctcccgtatgaaatcccagctcacgtcgacctcgtcttcgtcgaatcaacagcaacaagacatgtcaaactcgcatcagtcgaacggacccctccccggatctcctgcaggcaagtcgagatccaagatcgtccaaccgggaacccctactcaaggaggaaccccgagcaagatcccggttcatgtcgataggacgggcggttcgacgacggcgggagcgacctactcggtacctcctagtccttcgagggaacacggccatcatcgggggtctacccagcaaggcgggtacatcaccacttcgaaccaacaacaacaacatcaacagcaacataccgggctccctcaccatgccacctcgaacaaccctatgccccctccacctgcccctcaacgctcgctccacccgaaacaagattctcaccacgcccaggccgtcaccgcctacccgaacggggacggtgatggggatatccacatgaccaccgtcaacccgaacatgctccccgctgggtatttgcaggcgatcgctcaggctccagggacggcttatgggtcgacggggagtaacgttccggtcccctcgattcaggaacagagggtcgggttgaatcatcagcaacagtatcaacagcagcagcagcaaggcgggatgggcaagaggttgaaggaggataccaagatgcagtccgtactccgttcaggggcgaccgggcaggcagcgcaaggtcaaggacagcgtggggaagaccaaacaggcccccagcagttggcgctgtgggaaagagagatcctggccagtcaagaagttaaacgaaaggtacgttcgagatcgggttaccgtgcttcttctgccggtcagaactctgaccagaaccgatgctgtcgctgggaaccgttgtcatacaggctacactggcacagttgtatttcttggattactactttgatctgctcgggtatttgcatgctaggaagggtaggatgtctgggttcaagaacgacgttgccgctcgaggagtaagtccggttgtacccacctgacgaattgcggtgaaagtgcgagggaagactgactgagcccgtacgtgcgcctgtagctcgccccggaagacgtacaaaaggagttcaagtcgtatgttgggagagagcgagtcgtcctcagaaagaggaggatcaaactccgggtcgaccagttcaggatcatcgctcaggtgagcagtgattgtacggttgcctacttgaccctcttgactgactcgtgtgttgtgcgtacactgcgacgacaggtcggtcaaggaggctatggatccgtctttctcgcccgcaaggccgacacaggcgaagtgtgcgcgttgaaaaagatgaaaaagacgacgttggccaagatggacgaagtcaagcacgtcttgatcgagagggacattttaacggcgaccaagacgccttggttggtcagcctgttgtatgcgtttcaagacagggatcacgtgtacctcgccatggtgagtccggctcgtgacaattcttcccgtgggtactattccggcggactgactcgatgatgacgaccgcaggaatacgtcccgggtggagatttcaggaccttgttgaacaactcgggagtgctcaaggaggaacacgctagattctactcggccgagatgttcatgggagtgagcgagttgcacaaactcggttacattcatcgagacttgaaaccagaggtaggcgatccctgctgtttttcggcaaatgctacggctaggctgacggaatgatcctttacgcagaactttttggtcgactcgaccggtcacgtcaagttgaccgatttcggtctggccaccggagcgctgaacccggccaagatcgaatcgatgaagaacaaggtcagctagctgatggcttacggtgtcttttgtgtggctcatgaagctcatgcgattgaatgggttgacaacagctcgatcaagtcaaggatgagaatctcatcgtcagaagtaccttggagaggaggaccatgtacaagagtatgaggatggccgagccccgatacgtgagtcgacccgttttgactggagagctcagatctgaagggggtcgctgactgctgatcgtatgggcttacaggcggattcagtcgtcggatcgcccgattagtgagtacaacaaatgccatcgaggctgggcgcaggacgtgtgctgaatgaaacttgacgtcctcctagcatgccccccgaggtccttcgaggcaaaacttatacgttctctgccgattactggtcccttggatgtatcctgttcgagttcctctgcgtgagtagtgacccgcagtgatatcgctcgactcggacgttgatcggtatctgcgatattgccagggcttccctccattctcgggtagcaccccggacgagacctgggtcaacttgaagaactggcccaaggtcctgcgcaggcccgtgtatgacaagcctgaagatttgatcttcaacttgaccgaccaggcctgggaggcagtcgtccagtgagtccaggatcatattctacagaccgcaaccccggcctcgcgcacgatggtctgatgatggagtcaccttgacagcctgatcgcctcgcccaaagaccgggtgtcgacgattcaagaggtccaagccctcaagttctacagcgaggtcccgttcaagggtcttcgtcagatggccgcaccctttgtgcccatgctggacaacgagacggatgtcggctactttgactcgttcagctcgcccgaggacatggccaagtacgccgaagtcttcaagaagcaggcagacgttgaagcggtcgccgagaggggacggggtgagaagaacgcttgggtcgggttcacctttgggaggaacgccaatgtgagtcgggtatccccaatgcgctcgcgccgagtctgtgggctgtacgctcgggatagctgatggatatgcggtctgcgacgtgaaacataggtacccgctcagccgacgaggaggaaaccggatggcgaggcgctctacacgatgttttaagcgggcgtcatatcgatgtgggaagggttcaagatgggaatcatccccgtcctcaaggccgtgtgggagccttgccccgccatgtctctctgtctctctctccgcttttcttgcggtggcgtgcgacctatcgcgaaactagttcctgtctacctattgcttgccgtttcactctcacgctcgcgatcgacttctcgcgtctcatctgtgtatctacttttctcccgcgtgatcgacgttgtgctcgatgcttctctgtaacatgggctcacgccttgattccaacaatatacctcttgaccagatctgtaggaccacgcccaagcttcttgctggatcgtagattgagcgaaaagggtgatgaaacgactcgtcgaacctaggtgtcgatcggagatatcaccgatgacgcgcttgcttatgcgcttttcaccggagacgcgcgagtcggcatcacgggtgtttcccatttcgtgtcttcccttccgtggatttgacgcgcgaggttgacagcgattccgagtttgtttgttgcaccgcggaaacgcctcgaccttacctttcttcctctcttccctccactttgccctctcttcctttcctccctgcccattcgccctgggcctgcctgtgggacgacctggtcgaatcgtcaacgtcgagatcgtctcctgctcacccacgtacgcacgatcacccgcccaccttctcctccctccccccttctttctctcctcagtcagtcattttctagtccttcaagaacctccccctcgtctgtctcaccgtcgactctccataccaggaagaaaacgcagcaaaaacccagatcaaaatgttagtactcgctcctgcaaacgaacgaggaaaggagggccaggatggacggacgaggttgaatgggaggcagaggggggaatgtcaaggctaggggcaaaagagggaagctgggaaggatctgtaaagatcctgcctggtcgacatcggcaaaagggaatacggtcggcgggataggacgatcattgagcacttcggggaccgggcaggcgaaagcgagggtctgattcgggctgggttcgggtgggataaaaggatattgttcttcgggatcaagaggaggactctgggcgatggatctttgtcgacatcggaacaacgacatgcggaaggcaacagccgcgtctagcatggtcgttacggcgattcgcgaccacggacacgcagcggaaggcggatcaacgacgatctagttgatcacaaaaccaggaattcaacgccttagactcggatcacgaacgatagccaccaaagcggaagaagccccgtacatcttgaccaccaacgcgacgtcgacagcttgtccccgaaccacccgaaccatacctaaagccagaccctgcccaccttgtcacgcaagatcacctacccgcctgccatattccctccctcgcctccccctcgtcttgttcttcctctcctcctgctccgacctcgtctgaaaacccaacccttacgagagaatcaggaacagctcgctgataccccccatcggcgtcccgtcctttctgtccatttttgcaaacagggctcactctaacgtttggttctctcacccccgtaactacggaaagggctcgaggcagtggtaagttccaaagccaatggtgtgagcgtgtcggtctgccccgcttctaggctctttggaagggatcgccatggtgaaaggggtgtggcgggaaggaggacttgagacgatgacagtgatggcgatggcgatccgggagctgggtggcggggcggatcatggttcacaaatcgagccatgcacgggagattgatcaaccctacttccttcttcgttcacctacagtcgtgtctgcgctcaccaggccggtctcatccggtaagtcgcggattcgctcgaatgacgaggccgagggaaacgaaaggctcatctgaactcgatttcccggtcgaccttgtagacgatacggtctgatgatctgccgtcagtgtttccgtgagagggctgctcagatcggattcgagaaggtcagtccagacgcgcaccttcagccttgtccgggtcgttggctgactcgatcgaaaccactcatagcacaactaagccaatccaagatggaggtttagccgagcgaccctcgatgagggctccgacgggataccgtacatcacccgggaacgaggagatggatcggaactggaagaggctgtcgtcgatgtcgtcgtcaagcgtgcagggacggatacctgggacaagggatgatgtaaacgatgatcatgtcgatggggcttttctatcggatacttcttcaccttttttttcatcgtgcgattgcgctggcggtcgtacgtttgcacgtgtcgtgtctgatgtcggagctctgatgtcaaagactggggtcccaccgagcccagtcgatcgtccttgcgaacgaatgagactcaggggagtaggtggtcagtcggtgcttttgcttacgtaatgagatacgcctatcccgttctggtaacccggacccgccatctgcacgattactagacccgggagagtgcccgggccagattgacttgcgattcgatatatgctcatcagtcttcatactggagcgataaaactcataattccgagtcaaggctactttacggatatacctactagctgttcagaattcgcggtcagtaaggacatacttgggtgagcgcaagtcgggaccctttcttcctcctgaggaatgacgtcagtcttttggccaaaccctctgacactcgtcgaccttgctttcacttctcactgctcaacgtgatcgttgtcctgcacatagtcaccagcctagagaatctatagaggccatcgaacacctcgtcgaggagaaatacacgctcgaaaatcgcgtcgagagtcggagacacccctgtcgatcagcaatcactacagagaaagatgagctctgcaacattgcccgaggacctctgggcttcccaattgtcggtcagtatatagcgacccggactacccgacgacatacttcctcgactgaactaccacatcttacagagcgtaccgcccaaggaactcttgtctcgtctgacagcgcactcgcaacgatcaaaccaattcaacgagacccttgctgattatttccgagcgaggagcgccgccgaggccgattatgcggcggctctgaacaagattgtcaggaagtttgcggattcgggtttgggcagggatgcgggtggagagggtgggctgtgggaaagagcgatgagcgagatcgtagaggtgagtcatcgacaagtgatccccgtccttagctcctaattaacgcatcgtgctttctgcctacttagaccgcctcggcacagacctctctttctgacacgcttgcgaaagaattcgaatcccctcttcggtcaatgccatcccggaactctgcctggtctcgaatctcatctatccaggacaaggcggggaagacggtcaagtcctacgactcctccctggaaaaggtccaaaaggcacaaaagaagggtggatccaagctacagatggcgcagaacgatctgcagaacactactacctcgctcgctgggattctaccggccttgatttcggctcatcagagcatgaccttggacagactgaccgagttgaaggaactaggggtcaagtttgagacggtcttggctgaaaacggcaacagacgggtggatggaagtgaaaggggaatgaacaggctgctgggctgggaggttgaggaagaggtcaggggcatggctgtcaagttcggcggatcgccgaatgctggaggcggtccccctgccggctctgcaagggagatgggaggtttcggcggtgttgcggtcggtacgcccacgcggtcttcgagtaggtccgaaacgtcgtccttgaaagaggaggagcatggtcgctgatcgatcttgcagctgtgcgacgacccacactcgattccaaccacagttcgacaccgggccgcaactcgtcatcgtcgagacccactatcgataacggcctgcccaagcccgaacactcgtcgctgacctcgactcttaaatccaagttttcccgaaagtcgagtctgctgggcaatgtcgggctcggcagcggttcatcaccgaacgacaggttcgccggaaacggcgggcgaggacgtgcgggtagcgatgctaccgtgcggacaaatgccactggtgctaatgctggaagagccggctttgcagccgtgcctggatcctacgacaacaacgatcgaaacagttacgagaccggtaggagcggggtacccatcgccagtgtgagtcaagtctggcccaatctctccgttgtgaaacctgttctgaaccactcgttgcccactcagcctatcgcagagacacctcgagtggacgcggacgggttcactctgcctcccgagaaccgcggtcaggccccatgggagagacctaccggaacgcctagaaacctcttggatgacgaagatgacgagaccgatggggtttcccctctgccgactccaggagctaacggtagcttctcggctcccaagctgaatatggctctggctcctctccctatcgaagaagacgagactgagcgtcaagccgcactacagaagatgcagagcactctgctcgccaagcctcccgctggccccggtaggaaaaacacgatccgaggcaggcgagacgtccgcaatacgacgttcaacacccttcccgatgatatgcctctggctcaagctttgaagctgcaaggtcagcaagaggacgctgccgaacagagcaggatggtcgagtcgccggtgcaagaagtgctctccaccccgcctggtagcgcattcccgagcgggaaacctagcatgtcctcgggcacgtttactggtctcaaccccttgaccacgcagttcaccgggaggggtaccaacaacaacaacgtgtcgagtccgtcaagcatggtagggtccctgaatcccttcgatcaaaacggccccgccatagcgggcccgggtcttcgtgccaccatgaccgagaccgtcaacgcgatctcgaagggtggtttggtgcaaaaggccatggtaacgggagaaatctgcgtgaccatgcgggatcttccgcaatacatcccctcgaacggagtcggaccgattcatatccgcctagacgagtttgagcagctagaaaaggtcgcccctaaccccaagtacctcagtcaggttccggaacggcccggcgagtattatctcaacgtcgaactccttgccagtgcgaccatctcccaatcgagcaggccggtcttgttcaaataccagctgcatgttggagatggacgcgctggtgaatttgcgccgatcgaagttcatccccaatggaagacggccgctggagagactcgtctcctgatcaattacaaaagcaacgatcagggccgcttggcaagaagtctcgccgccactttatcgacgtcgccgttcggtgaaagtacttctggaaagttgtccgaggtttccgtcgtcgctggactcgggggaccggaaatcacgggtgtccaagccaaacctcccggtggcacttggtcagccgagaagcgcaaaatggtgtggaacgtgaccgacgtcgatcttgattcgaggtccgcggcgtctgctggcaagatcgtggcaagatttgtcagctcccctgatgctccccttggccagccccaaggtgttagcttacaatggaagtgccagggcggactgaccagtggactaagcttgtccattgtcacaccgcctggtactgcagaaggatggcgtttcgaggaggtcggaaaggctgtcgttagtggcaagtacactgctgagtgatcatatttgccaggcgatgagtagaaagtgtgtagagacttagttgtagtattccaacaaacaagacgccgacgaattgaatcataatcccatcaacgcgaccaaaattcgaccgcgtttcatgttttacgtaacttttcgttcggcgagctcgatcaaccgagtattcgagcgagatctagattttgagtatgctcctcagttgcaacttcgattcaatcatgagacaacacaaatccgcgcacgacagtcaaaaggctactccttgtcacttctgactctgttgagacagtaacactgtcgaactgtaagaaccggcttatcactccacgaagcaggtcgactcttggagtagacgcacagcagccatgtctacgcgaaagatcactgtcgagaccaggtcgacgcatgtgaagaatgtcgaagaggttttcgaggagataaagtgtacgttacaaaccagaatgcttacgcaagtcactaaaggcactcgttatgcacaggtgcctgtgcagaccatctccaacagctcgataggctcgatcgaagcactgatcacgtccccaacgtgcccgaggcactgatcacctcgattcgagggaccgcgatcaacgtcaagaatctcgcacaagggatccgaggcctggataagactgagagtaagaaacggcgacgagacgagggggacgacttcggtgaaagcaggagcgcagggaacgcacagacagaaatacgggagtggctagacgagcaaggcaagtcagatgtgttgttctcttgtccgatgcaatagacatcatcaacggcaatttcaggcgtcaatctttggaatttatccattgagatggatactgagacgcagcggtattcgcaactggacactagcagccaagacggcctgagatcctggaagcgtctagtggcggtcggttagtaagaggcgtacataccgactgatccgctttttgacgcttctcgattagtgcgatatctctcatgggctctgatcggagctagtactgaatccaggccaatgccatactgtaagcaaccgtacgagacccttgatacgctgatgccctgatagaaacatgtgttacagtcgccttccgaaatctgcatgtctcggcaaagaccgcggcaaccttgttcggtagagacatcttttgatatcggcaaacggtccatgacttacgaggcccgcctgatccagatttgcaaaacgttaacatctctcaggaagtcctggtcgatgctgcaagagtatgacaccctttgtgggctggccaagatcgtcttgagctgatttacctgtgtcacagtggtatgaacagctcaaagatccccggatggcgatcgagggcaagactcgccgcgaaaagtccatggtacaaatggaatatctcttgatcagggttgacgtggttagtcacaagtgttttgtttttcagctcagttgctgagcgcaaactctgagaacaggagatgcaaagaaacaactccgcactagcttggactctctatgatgaagctagcggtaggatttcgcttactcgtgggttcttgcttgtctatgctcaccctgacctgccttactagctttgattacaagtgactggaagtttcgagacgttcgtacttccagagggtattcctgcaggtccctcgaatgaaaaacctcaacactatgttcatcttggtatcaggtcgaaagtttcgtcatcaaggcatgggaagtgggacactcgatccttacaaccgtaggtagagaaatcccaccgcaagaagacggagacgccactgtcgagcagcatacgacgactgtcagtaccaccagcaccgcgatcaactggttccgcaaagggctggcaattcttgagccctacgaaggaacacaacaatctgccaaggaatggaagaggacgaaactagggctgatgcagggtttagcgcaggcgtgcttggcagcatccagctctgatccctcccaccttgacacggccgacagcatcgttcgcgagatgatcgacgacgaggatcttcgtgccgaggactcatcgcaagccatgcgttatacgatgatcgccataatgaagatgagaaaggctccagtgtcgacagtggtcactgttctcgaaagtctcgtttcagacgtagcgatcactgaggaaaacgtcaacaagctgataggagaggtttccagcctgaccgggacttacaattgtgcagcaggcggcatatacgtcaggtttctcgaagtcatggttcaagatgtcgacggtagtatttgggtcctggtccaccgcgttttgctcgccctcctgctctatctgcaaggcagagtactgaccgagcccgatcagtccctaagacaagcgcaaaaagctctcaagggtaatacacttgatgcggtcggtaaattcggtggctcacaaccgtgtacctcctgtacagtgatcaacgaaagcaccagaggtaacctgaacttcgaacaagccctcgcttgcacaacggtaagagcggcggtaggttctgagagcattcgctgattatagtattcccggttactgaacacaatcagttaatttggaagattgcagacaagctgagcgatcacaaagatctggcttttgtgaagcatagtggggaatggtgtaagctggtgtctgtgtggccttgatgcgcccggtactgaactgccacgtatacagttctacttggggcgcatccggcactatctgcaatttccgaaaccgatacagagcggtgcaggaggtcagtccaatcgatacgaagggcgcagtactggcattatatgtgaccggaatgtcaggagggccgctttgagctatatgaaagttcaagcaacgggaacagccgaagatatcctgacggcttgcaacccgaaatgtgccgagacgcaatatttacgctttcttgtaatgttacgtcaaggttagtgttctcgaccgttaacaaatccagaaggatgaaacatttacgtctggtcagatcgcactcccgagggttagtcctgtgaaaagccgaatcgccgtgtggcgttgaagttcgatctcctgcgtcttgaagcttgccaggctctcagcgctatgggagcttgcgaagatctccaggcaactcacctgttgatgacagtgtaagaaatgacatctgacggacaagaagacccttcaatgctgatctatggcataaagacaagccgccaacgacgctgccgacccgactatcgtctccaaagccttggcgaccttgttgaaggcgcttgagaagctgggtctgaggggaaggggtattgaagagctggtcttattgcggtaagtgtaaatggcaggtgctaataaatccgcaaggccgaatcctcaaccttaattcctcaatctagttgcttgatcaagatgacactggtccagttgcgggaaggagcttcagggtgagatcaatgagtagaaagtgaaaatgtatcactgacttcatcaagggttagactgaacatctacgcggatttactcagctatttccagcgaggcgggtccaagggttatcatcttgtcgcttacgatgtgacttatcgccccggctgacccgcaggtctgaacttcgctaaagagatgctggcgcaagcggagatcgccacgaagtataaagagattgcgtggctctacaagaccgcttacaacacgtctttcgaagcggtgaaggtctgggaacagaagtcggaattggcagcaatgtttgacattacgatcggggtggggttcagcgttttctgaggaagcgaggcttcacgtgactgaacatgagtgcttcacacagttgatggaatgctatgggtcgatcccgatgcaggaattggatcccaagtttctgttgcagctcgccaccgcacgatactttgccgtttgcgtactcggtgagttaccttcatgtggtgccaagttgcgcgaccatagatcctcaaggtgccgcacagttttccacagcagagagatcacagaaagcggcagcaaggttggaaacatagtcatcggcagcattaatagatctgaactttgccttttcgaagataaccgttctgcagcaagctaaagcccgaattccagagtgcttttcatctctggaagctgtgatagcggcaaacgagtccgacaaacagctctgcgggaaaatgacatctgctctgcacgtattctctgcggagatcatggtggaattgggcgaatgggacgacatcggctcaatgatgcaggtaaatcatcatgtccaaccggaaacagaccatgcctaacaatttgggtcatgtgccgtacctcagcgaatgacagcaggggcattgacgatcgagactctgcagagtatggcctcgctaaccctgacggcggaaacccctcctgacggtatgcatctgactaagatcgcgcggccgaaggcccgagctgaattgtgccatcgcacgttttggttcagtcgccgaaattgtcgctaggcatatacttcgggtgatcatatctccctgctatggtgacaacatgactaaacagagcaggtaaataccgaaacgaacgagcgccttgtacttggtgcctgatgtgtaccttgacaagcgcaggtggatcagggcaaccgtggacatgtgcctcagccgtggcgcatacgatgatgcactcggatacgcggagcaggcaaagatctgtatggagcgagggaaaaaggtagatctcgctcgcagcatcaggtgcatagctaatgcgctgactacatcgattatgcatagacatatcctaacgaagagattgactggttgtggagatcatgctacaaccaaagtctggatctttcagagtaagtttcggggttgaaggtctgctcgggaggttgcagatctcacccagcagttgagcagcctgggagacaaggagcggtgcaagaaatggatggaaatgtctctgtcgttgtgcagtcacgccaagaacggggatgccatcagggctcaggtttgtcagatccttgttgtatattaagcgcaatggactgatcgaatgtccttcacagctatacccgcaatacgaacgtctgcttgcgcgcatgtcatgaatccgtgaccattcgatcagccaagctggaaaagcaatcccgctcttagtcctttccataacctacgaccacatgttgcatgcagactagcagactcactacctggtaccgatcgaagcgaggcaacagcttgtatgattgtagattgtatgaacgattatgattgtagcatgaaacacctggtacaagggaacctcacgcgcttgacggtcgacgcgcttctaagtgatccacttgctcgaggttcagacgtcatctagcaaagtaagattgacatcaagttgctgcaacttgcaagctgttatcgactagaagccgcacaaactatagtcggtcagcgagatctttccggaataacactagagtgttcttcagcgtcaaaacagtaccaatatggcggaacggacagaagaggagcgtgcaaagctcaagacgttcttgttcaaggcggtcagcgttcagtgagtccccccttcaggttgagccgactcgggccacctatccagatcgctttgggaaagccgcacttgtttttctggttgaccacactgactgactcctttgcttcccctccttcatcgtcctcatctcctgccgctgcatcgttcacaggacggatgccgagccccagcttctcgcggattacctgtttgcattgatcgagaacaatgcgaacatcagctcgaacgagctgtcccaggtccgttccaatccattgtcgtacagagcaagaggggtagatactaatttcaaacatcgcttgccacttgtttctgcaggagatttctgaattcgtcgagacggatgcacctcagctcgcccagacactgtattcggccattcattccaaatcatatctctcgcccgccgccagcacgtccttcaacccgagctcgaaacccatcccaactggacccgcttcggcaagcaagaagcgaaggctgtcggactctggtgatgtcgagatgacggatgcaggagccagtgggaacaagattaccaggttgaacgatggcaacatgggtgcgggacccgcaggccggataggagttgacgagcggatgatgggtcacgaggccgggcgaggaaaacggggacgaggtggtgccatgtttggaaacggcatggacggtcacggcagaaggaagaagccatgtttcgattaccatagtacgtcacataaagggacatcgccgaccgggtccttgccggctttgctgacccagtttatgcgctgcagacaagggattctgtgcacgaggcatgcagtgcccttatgagcatgggccggacaccatgtacagcatgcccggtggcggtatgccacccatgccattcccctttatgatgcccttccctcccaacggtgccggtccaggaggacccgctccgtcaccacaagagggagcaatatcggatcaatctatgcagatggacggggcagctcgagcggcggcgagtcaggaatactcgcctgaccaaccggggatggcaggacctgcgggtccgttccccggaatggcatcgccgaacgcaggtggtcccttccctttcccaccgggcggaccaccaccaccgggaatgatgccttttatgatgggaatgtcgggcatgttcccgccattcgatcaaggaggagcaaggggcaacgcacggggtcgagggcgaggtggacgtggaggtcgtggcggtcggaacggcccggaagggttcaacgattgggacggagacctgtcgactcgcccgcccaaggacaacacgtcgaccacgctcgtcgtcgctgacattccggccgagcacctcaacctcgaagccatccacaatcaattcaagcagtttggaaccgtgaccaatgtcgctgtcgagacccgagccaaaaaggcgcttgtcgcgttttcgacgaaccgggaagctcactcggcgtggttgagcaaggaatccttctttggcgatcgacacgtcaaggtcctctggcaccgtccccgagagggtcaaggcgaggtcgggcaaaaggctttgaacgactcggcgccgttattggagaacctgcgcaagatcgatcagcaaggcgtggaagctttccagagcgctgggaaatcgaccttgcccaccgtcgacccggagatcaaggctcagctcgcgggcgtccgggaacgagggttacaactcgaaaagatcgtggccgagcagaaagtcctgatggtccggctcgagggtacaaaagacgccgaggaaaagctcaagttgaagacccgcttgaaggagctcattggcgaatcgagcgtgatcaagcaggccaatgcggggatcgacgttgaaaagctccaggggatcatcgaagcgcaaaccaaggcgagggaggaagccaaggccaagcaaggccgggtacagagtcgaccgcaggatggggtgcatagtatacaagagatgctggatcacgagatggaggaacacagtttgcaggcgcagttggagggtagcaaggggaaaaaggacgaagaggtcgacgaggagacgctcaagctgagagcgcagctggcggcactcaagaatcaggttagtcgagcttgttttctgcgggtcagggcgggttggatagagatggtactgacgattggagcacggaccgttccaggcttcgagcttggggatcaacccggacgcctctgtctatcagccccggggtgggtaccgcggtggcggacgcggcggtggtggctatcgaggttccacccgtggcggtggtgcagggccgtcgacgcatgtcaaccggtcgttgaaactcgacaatcgaccgaaatccctggtcatcaccggtcaggccgtcaaggacgacacgacgggcgagacgatgaaacaggtgaaagaatggtttgccgatttctcagacgtcttggtcagagaacccgtcgtcgtcgaggataaagtgatcgtgacgttttcgaaccgggggtcggccgagacggtaagcagggcgatcagaggaatccgaatcgagatcgaaatcgagtcgaggctgatgtcgccatttctcggtctgtccgttttcttcttgttctgcttttgacgtgggcgttcgtgatctccaggcgatggcgatggggacgacgatcccggccgtctctccaccggtgacgatcggatggtacgccccgcccgttcccgaggttcccacgggtgcgcctgcaccggggatggaggggatcgagacgacgacgacgacgagagaggtcgaagtgacccggggcgagagggacgtcgatgagtaggtcggcgcaagtgggggtcaagggcgtcgttcgggtggattcggtagagtccttcatgtaatgttatcctagtttgtctcggaacgttagacacatgacacacttgcatgcccatgtacttctagtagtcatgaagcgtatcacgtgatgtgtgtgtgtagcacgaaccgctgcggatgcgcgtaaggaggcttccgcgtatgccggcatctgctgtcagacccggggttttgcgcttttccaaagtggtctgtctttctttcgcactggcgttgtctcgcgctgccgtcatctcaactcgatcagacgtgggttagctcgcgtccaggtctcgccttcccctgcttccttcccttcccttcccttcccctgcctttccccccctttcaccaaattttgatgattgcgagctaacgagacgcagacacactagacacagaggtcacctcgtagtaacatttcaaccacccactacctctctacctactttcaaccataacacatcctctacctcgtcacccaacctcccgctcttcatctcgtcgacgctcaaatacacttgcgtctgtaaattagctttacacacaaacacacacacacacacacaaacggacaaacgagacatcgcacgctcgaccgtttcgaccgagcctcaccccgttctttgaacaaacacaacaagcgcacacgaggaggaaatttctctccttccccttctcactcgtattcgaactcgaactcgaactcgaatccgtcgctcgttgcaagacgatctcgatccgttctaaaaggaagacgtagataggcatctacctcctttctactcgttcgttcgcaaaggcatccatcaaccgagaagaggtcatcatcgacaactatctctctctttcgctcttgaacttgaactagaatttcaggaacaagtaccaacctctgaccaaaagacacactccgaaacgtcacgtctgatctgatctcgtcactccaacctcttatcgtcgaataaacatggcttccaaatcggaagacgtcaaacccgtcgtcccggaggacacccactcgaactcgattgaagggacggacgacctgaaatccccaacaggaggtgctaaccggtccaacctccccgggacggcgttgaacaacgcatcttccccctcctcccagcagcaggggcaaggcaaatccaggttcaacctcggttccaactcgaacccccactctcactcgggaggagaatccgtcggactcggtgccaagagtatgccagggagtaggaggtcgagtgcgcttcccggctctacgggtgctgcggctggaaatggacctacctcggcaggaggagagacgtttgggatggacaagcttagtttgagtacgggtcaggtgggcgaagtgaggggggaggaggatgtcggtgccgagggtgctagaggtgagtcgacagggccgtgcccgtggccgtcactgccgtcgaacgagcttgacagcgatgggcgcgaaagcaaggtggatgctgatcaggatggttgggtgctgctagattcggtcaactttttgaacttgggtaacgaggacgaagggttcgtacccgccggtgcgagggagagtaacaaggtgagcccgatcttgctatggcttgtcgtgctctttcgacccgtccgagtcgaccagggattgaccacgcattgcatcgcatcgcatgtcgaccacggcaggcttcgaagctttcgacctcgtccgccgcgctcgatctcgctcccctggctcagaccaaccagcgattccctcatcgtccctttgacaccgggttgaagacgtccgaatggcctcaattctcgggcgtacccaagtctgccaacgacgccgccgggtccaccggacagaccgccggcccgggagctcagaacggttcgggtaacgctagcggtcaggtctcgagcaacgctacgggtaacggagccgctacaacgggcaacaccaccaacaacaacaacgtcaacggggtcgccgccagtgccaacgtctcgagacgggaatcccctacgggacccaacgccggtggagctgacatgtcggcctcgatcgcttcgttgcccccgatgcccagccgttccgtccctggaaccccaggcgcacccctaaactcggcgggtaacctcggtggattgtcgagcttccgaaagaacggacccccgacggccgggatcgccggtggacaggcactcgagggactctcggccagccagagagggttctccaaccccgacttggccaaggcgttccaaaaggtcggacccggctttggatccatcgctgcaggacccagggtgagtcgtgtgtcgcgtttaggtggagagacgggggtatcgaggtaggacgcccttggtgctgatatacctaccttgtccctctgggtttccctctcgcagggcaagaagccttatggtcaacccgaccccctttacgcgggtatggaggcacccgggatcgcccctctcggcggacaccagttcggaggttacgagtcgtacgggttcgacgacgacaactttggttcgggcgcgctttaccctggaggtgggatgggcatgaggtcgaaaaaggccgacatggagcgagagtgtgagtcggtcgagtcgggtttgttcaaaggcgggagctgatcctatcccgtgtcttttctggggggggatgtctgcaatagacaaccgtttcgctgggatgcgactggaggatctgcagggcgaaatcttgtccctctcgaaggatcagcatggatgtcgttacctgcaaaagaagctggaagaggaagctcccgagcacagggatatgatctttagggagacttatggacacttccccgaactcatgactggtgagtttgcgggcaattcttgcacgccggcgtattggcggtggctgacaaggcgctcgcccgtctctagaccccttcggcaactacctctgtcaaaagctcttggagtactcgaccgaggagcagcgcaacgtcatctgcgaatccgtagccaacgaccttgtcggcatctcgctcaacatgcacggcacacgtgccgtccagaagatgatcgatttcctcagcaaccctaggcagcccaaccagatcagaagcatcatcctcgccttgagcttgaacgtcgtcgccctcatcaaggacttgaacgggaaccacgtcatccaaaagtgcttgaaccgattgattcccgaggacaaccaggtgggtcgaggtttatatgtttcatgggcatcaagcagctgcagaagctgaacgtccctccctgaccacccacgacagttcatctacaacgccgtcgccgctcactgcgtcgaggtcgctactcaccgacacggatgttgcgtcctccagcgatgcatcgatcacgctaccgactcgcagcgggtacagctcgtcaccgaaatcaccttccacgcattgaccctggtccaggatcctttcggaaactacgtcgtccgtgagtgaatgtcgtgggcctgtaccgggagaaaggtgtggaatgttgatgttcttgacgcttgttcactcctgcacagaatacgtcctcgatctgaacgacgttcgattcagcgaacctctgatccgtcaattcgtcggcaacgtttgcgtcctgtcggtccaaaagttcagctcgaacgtcattgaaaaggtgcgccaccacgacatgaccttgcatgaagacagaaacctggctgaacacctcgaccttttgcttccgacagtgcatccgagtggccgaccctgaactccgaaagatcttggtcgccgagctcttgagccggggccgattagaaaagctgttgcgcgactcgtttgccaactatgtcgttcagaccgctttggactatgccgacccggctcagcgaatggccgtgagtaggatgtgatttttcattcgagtctgacccgcctgacatgatggcattcacgttgtgcagctcgtcgaccacatccgacccatcttgcccatgatccgcaacacgccttacggcaagcgaatccaatccaagctgcagcgtgaacagcacggtcaccaggatcactacggtggcgccggcagcggcgccggtggtgcgggtgccagcagcggtggtggtggcggtggcggataccagggacaacagggcatgatgaacctcggtatgaacaactacggcaacggatacggtcacggtggacacggtggcaaccatggcggacgtggtggacacttttcccacccccgtcacatgggcggtcatcccaacatgcaccacaacgccatgaacgacatgtacggccccggacccggtcaaggtatgggcggatacggtggttaccagggcgccatgggtggtggatacgacatgggtttccagcacatgggtcaacaacagtttggcggaccccacggacaatttgccggtaaccagggtggattccctcctgccggtcagaacgccaacgactcggcctttggccccgccggctacaacggacccgcaccagtcgagcagcaggacggacccatcggtaacattggcatcgtccccatcgagaatggaaacctcggagggttccctcctcagcaaggattcgctccctacatgtagaagacggaaaacaacactctcacaccaaaatcaatcgaacgactcctttctcctcaactgttttccctctatctccccccgcctcaccctgattcccattagatgcgcaagatgacgagaggatccgaccatcgctaccccctttcagccatctctcctggcgtgtatgaaacgaactccatctccatcccctctttctaccgacctcgcggcccggcccagtggagcaagaatcgtcattttcatttctttcgctctctctgccggctggaacggtgcagcaagatgtctgtacgactgtagatccggacccgaggaggcgctcgtccagggtgtttcctcgcatgccgttcttttcttcctcccccgtctccctttttgtgctcctccctgcatcttttgtcgttgcctttccgctctcgtgttggacagcgacggaacggtcgtcttcctcgtatacaaacaggtgtatcactgcggcttcccggaacgtcgaacgtggaatgtaaaaccatcgaaaatgccatccccctatagtttgtgacaaagatctcccgcctgctacgcgcgcgcgctcactcgctttgccgcctggaccgagatcacgttgcgatcggtcgttgccgcacgtcgttgtcgcttaagcgagctcgggatggtcgagcaaattgtcgaatccctttctctcctggacgtcttgtcgttcgtgacccacttggtaacagctggatgtagcactgacaggtgacccattatcgtatgcgtcgtcctttcgcggatttgaacggtggtaatcgatctgcccttgcgttggtggtggtcggtttaatttcgattttgaacgttcaagttgtgacaccctaagcccacgagagatattcgaaattcgtgctgattcctcggaccgaaccgaagcgagaaacggagatttacgagaattcgaccaaaactaaaatgtactggaaatttacaacccttcgacaaacagactatcgaccgaaagtcatctcgtttcctatcgtattcagcacagcgtttcagtgacaagaccttggctttcctcttccatctccaatcctcccttcctgcgccgtgtcgatccccgcgaccagccttttatcgagcaacgccgaaaatccggaatacgccagccaaaaagaaaaaaagtcgacgacgacggaacctcgagagatgtctctcccatcccttcctcccgtcgccaggacggcggctcagccagcaagaccagtcggaggtcaaaagaagccttatccgttcatgtaagtagcgataggtcggacgatagattctcgggcatgggtcgggcgggaatgacgacgagctcgagtacacggctggtcaaggcacgttgtaaacgtcgagagctgatcatttacaattaatggcctcttctactatgtcttcgtccacttgcatatctcgcggaatgtatgcaattcctcgcccgtctacaatatggatcgaatcgctggtcaaccgacgtgcaggctcggaggtgagttccgagggtcaaatcacgacatgcacccatgcgcaagtcctaaccaaatgccataaactatcgctttcttatcataggcttcgcttcgggaatggcgacatgtttcacgcaagtcctcgtcctcccctccatctcatcatgtcgagatatccctgactgaccctgactcgcccgtttccacctcacctctacaacaggcatcctctcgacctgacaaaagtgcagatgcagaccgcaaaagccaacgacaagaacacgctgggtttcatcggagggatcatcaagcagcacggtcagtctgtccgtagagcggtagtttgtcaaggagacgatattgatgcgtgctttcgatgcggtctgtaggagtaagaggagtatatgacgggctgacggcggcgatgctccgagcgtgagtaggaacctcgttcgacgactctccccatagctgaactcagtcgactcaccttgttttcacatgtagcctgacatattcgacgttccgattcggagcgtacgagtttgcgaagaaccatttcctctctcccaacccgggcttggtctcgatgatcggagccagcgcagctgcaggagggatggccggcctactgggtgtccccgctggtgagtgggattcgctgttgtcgagattgagacgggacgaccccccctgattgactagcctcgcggtgtgttggcagaggtcgtcttgatcaggatggcgtcggatcgagcgaaacctatcggggagaggttcatgtaccggaattgcgtgcacgggctgtacaggatcgtcaaggatgagggtgtcttggctctctaccgtggatggcaaccgaacactgtgagtcccgctgtaaagcggggttggcccattgatgcgatcagattttgttgactctttacctcgtcgtcgtcacgctgcaacgcaggtccgagcgatcttgatgaacgcttcccagttggcctcatacgacgtgttcaagaagctattgttgagcatcaagggatcaagggatggacccgttctgcagtttggagccagtttcttggccggtaccgtcgctaccagtgagtccaaaccggcttatctcggaatacgtctgcaacgagggctcacgacgatcgtgtattcttttgcgtgcgttttagccatctgtgcgcctgccgatgtcgtcaagtcgagagtcatggccgccaagggcggtgccagtatacccaccatcatctcgaccgctgtcaagcaggaaggtctcaagttcttcttccgaggctggaccgctgcttggtgagtcggggcgtacgcatgtgcgtcgtcagtacgatcaatactgaccctggatatcgtacttcctggtcttcatagggtccgtctttgtcctcaaaccgtcctcactttggtcttcctggaacaactccgcctgggtgtggatacttaccgcgccaagctctaatccgccgtcgacaatttgggcggcacgggtgtacggaagagcggggcggacaacaagtacgagcatgtagcatgtagcatggccattaatctatagatgtgcacgattacataccttttttttgcacggtcaaggctactactactggatgttgttccatgtccccactactttgcttccgatttgcttcctaaattgcatcccaacgcgatcgaatctacaaagagttattcgtcggggtggagtgatgactcctctcggtgtcggcacacggataaccataacattcactctcgataaagatactaccacattagcagtcgtcgatgggtagtatcatcaggaggcagtaaagtctcaagaaacggcaacgatctatctgtgggaccgaacgaggtcgtgatcaggaccatgccgtcgaaatacctcggtcaggatcactcggcgaattaccactacccgacgcaaaataacggtcaacagtacaataacggctacagtccccaaaattcgatctatgaggatccggaaaagagaaattactcctcgccgccttcgggcagttcgagtcgtcgtagctcggcgggcaatgtcttgatggatctttcgagtcccgccgggggattgggcttctcgagcttgaacctgagttctggatcccgtgtcgaggctgggaacgcacacgagcgaggacaagagcgtgggatgggccaagcgggtcgagtgaggtcgaggtggaagagcaaggtggtcatcatgcttgggatgaggtttgggtggatcgtgctcgtcatctggtacgaggtcggcgtggtgagtcttccctgtgtgttcttgtcgcggtcgtcgcgatctttgcaacgccgcatattgacaatctcgtcttgatggtgccattaaaagttcttccactctgtctcggagtgcaagttccccgatgctagtctccacgttccgacgtcgactacgctcgactctctctcacaccccaacccccgctcgacacctccagaaccgacacacatcctcatcctcgccgatcctcagatccctcatccgatcttgtcctacccgacccgtcatcccgcgttccaggccttgtcgacgtggatcatcgatctctacatgcgcaagagctggaacgtcgccatgaggctcggacgcgtggacgcagtgatcatggtgggagacatgatggactggggtcgaggcgtctttggggaagaagagtacgaaaactatctggccaggttcaagagcatattcagggtgccggaagaggtgacgatgaagtttgtcgcggggaatcacgatgtggtaggtcggcctttggcagcgggatcagaaacaggtcgattcgggctctcgaggtggacgactaacggttccgcccttgtcgtattgtgacatcagggactcgggccgaataggctcttcagcccgcagtcgaaacagcgattcgcagatcagtgcgtaacatctctttgctcgacttttcgccaggctcgtgttcgaagccaggtcaagcgtgctgtttagctgaccacgcgcccgcgccctgaccagcttttcgaaaccgaacgaactggtctcgattgccaaccacactttcatcatgctggacgcgccgagtctggtcgaagaggattatcgacggtatgcagccgaggtccagttgggcgagtgggaaggggtggcaggcggtgtgatcgagtttgtcaagacattaggggatggtacgtgcactactatgtccatccttttgtacgcagtgtgaggctgacttcgacttgaatgcaccccagcgcctccatcggaacctaggatcttgatcactcacatcccattggcaagaccggaatccgcttcgtgtggcccgttgagagaacgaggacggatcttgaagggggctggaatcggttatcaaaacttgttgggaagcgagacgaccaggttcttgttgaataatgtcaagccgagcgtcatctacaggtaggtctcccatgatattattgggtgctttggctgcgcgccacggcgttgtcactgattctgtgtgctcctggtcgaatagtggggacgaccacgattactgtgattatcgacatccgaacggcgtgcgagaggtcacgctcaaggcattctcgatggctatgggaatccgtcgaccgggcttccagctcctatctctcattccgccaccaacggacgccaacctactcaacctgcctcatcggacacatgccgacatgccatgcttcctgccagaccagatgaagatttacaccgccagatacttgccgctagccatcttgtccctgctagtgttgtgctggatcaactttcgtaatgccgtccatcgtcatggaggttggaaagccgggttcgcacaagcggggggcaaagtcgcacggacgctgtcgcctaatctgagccgatcgccgagctcctctgatctgcaagccgatcgcaaatcgaggcggggcgagttgacagtgcctctaacgttgccctcacgaaggtcctcgagcaacctgcacatgagcccggccaacctcgaaaagaccatttcgactggctctcgatcgagaccacctagcctcgcacctatcaggaggatcactaagagcgcgccagtctcacctctcggcagtcctcgttctgacgccttgatcatggaggaagaggacgcctcgggcgggaatagtcccaattccgaggccctgtactttggtcagcctcgaccccgacaaacttcttatgccaacacgctcgcgcccacagaagacggacgacccttggcgggcgaaccacattcatactttcaatcgatgccggacgaatcgcccagtcgtggtgggacgcctagcggctccttgagtaaacgacctcaggcgcaccggcgggtgtcacggatgagcgattggcaagccgcagcaaaggctaaagacaagacggtcatggcgttggtgtttgattcggctccagtctcccgctggaaacgttggatcggtcgagatcagctagtcctactcggtcgagcgttaggtgggcggcatggtatcctggccaggagtagcaaggacgcgttgacgatcgcgtggccgaccttgctcgtctttctggtcctcaatgtctcgttcttctatcaataagtcttgacgcgctggtcgtgtatggtcggttgtcatagtatgagcatcaccatgaggagcttggcgaggcgtaggtgatccctcccccatatctggggaagaggatgtctgctgcgagtccatttcaccagtaaacatgactcgaaaaaaagtgctttctgcaccctgagcggaatgcataatcgcctgcatgtcattcatcgtataactttctacctcgttggaatgcgcgaaatcgtcctcatccatcaaaccctgttcaacgaggtgtcatttgagaccggatagctgctcgagcgcggcctcgggtcggaatggggggggggaggttgcccgcccagtcgagtcgaatctatgaagtgatatccagactagtgggggttgtcgagggtaagaaatctctagatatgtaatgatatggtagggaagcgatccgcatgtgctgtcaactacaaggatcaatcgctggatataaggaaacatgtttgcccgttcgtagagttctatagccatatagcgggctggtttgcccgggcgtacgagctgaaaatcaggtatcgtcaatcacctttcgatgatcgactctctctaggttcatataaatgttgcccgcatcccttgagaagactaccagaccgcagaagcggctgattgtatcagggacatgggtatgaggagaaccagtttgtcggaaaaggttggatttggatttgcccaggtagcggtgggagcttgctgcctcgctcgtttgagcgacggtcttatgatagagctcgaaagatacgggttgtcatgacgctaggccaaagtcctcgaaccgctgcggtttcggaagatgtatagtcacatcacgtcgaccctattgcatgtatagtcaaatgcaacgacaaagtgagaaatttataggagttccgcatcacctgagcctgacacgtatgactttgcctggagcctgacaattcttccgcttaatgatacaaaatgcctcgacgaggcgtgccgcgcgccgtgatctattctagcgaaaaacaaaacgtcctttgcgtaataactatgctaaactatcccccgaacagccatgatgatccttgattgctatccatctatcttcaatctcacttggccttgatgtcatttttggctgcttgcttgcgttgttcaatttcctctcgatacctggcctcggatagtggtgatccgtccggattggtcggaagtggtcggaacaaggcacaatctgcaccagaatcggttttgtctgcgaaagtacgatacaaagccatcagactggtggaatgagtcctctcaggggggctggagctcacgatgtcgtgttaatgcatcgagacgtgcaaacgtgcggtgacaatgttcgcactcgaaaggcttgactcctgcatgcagctgcatgtgtcgcttgcagtcatgctgacgcgcgaaagctgtcggtcggtgaacacaacgaaattagcgagtgcgagtagtctctcgcgctggacataaccgacctttattacatcctggataattacacaaaaagggcctctcctcgttgtgcgacctgatgtgacctttgaggttgaattgtctgcgtgcggtccaagttgtcaactcgagtaacgtaaaaaatctcatccgattggcgaaactcaccttgtgaatgtgctaccacagcccggtatagggcaaatgaaaagaccatcgcttgtccgcctgatcttggcagcgttctcggtctttgtcgaagtgacacgttgcttgaccggtttcatggcagcgggcggattatcactggctgtcgaagcagaggaaagtcgccgagttcgcctggcgttcggtggcgggactgctccatgatctaccccaagcgtgtgtctggttgtattctcgggctgatagtcgtctgacagcggcttcgtgtacggagatgacgcccgacggccatacggactggtatctcgtgaccggctggcactgcgagatcgcccggacgactttgcgacttgcggtgcgtcaagatagtctccaggaccactgatgtcagacctgagtggattcgagagattggcacaacatactcgctgatcgtgagaaaagcacgagcttaccttccgtcgtcaaacgcatcgatatcgagtctcgacctgtaatcttcgctcttgacggctctggcatggcccgcgccgcgagagtatgatctacccctatgggaaccattgaaaacgccgagatgggtatccggctgctccatggacacgtcctcgccggtaatgcttccgtggaacgtcgtctgctggaagtcgggcgaggcagggttcataagagcgagattccgtgccatacgcgagtcgaaggagagtcggcggccatccctggtcagaatgtacgtcgtgccattcgggtcgacccccgtgatcacgtagctactcttcccaccctcgccgttctgaccgccgactagcgccgcaaaagcggccgcgtcggacatgccctggtgatcttgcgatgcctgctctgcctgcccggcatcacttccaccagatcctcgaagattactcgtgtcgtactggtagttgccagtcgtcccgaaagtagccgccatgaccatcttgggatccactcctggaggtgcgtcggctggattgctgattcctccggacgaatgagccgagagagagatagcatcatccgagccctgatcaccaaacagctgcctgatcgcttcaatgtcgaattgggagaacaagttttgcatctgtccctcggaacgcgaacgttgccggaggaacggggcggtcaacgcacgagtcgcttcggcggtaggatctgcagtagcatagggagccgtgttgggcgcgccgcccatttggtacaacgcctgattggccgttgcaatgtccagttgaacgggtgctcgctgtatatagttgccgctgtgagaagcacgcctcgaagccttttccgccgagctttcgagatgatcggtcagggacggggcactgataccagcagcctggatggcgtccgatccttgagccgcctgagcctgcatcgccagcttttcccagatccccttgccatccttgagaccgctgatgggtgtactgggcacgatattgatgctcggcccacctggtccgatcggagacaggtaggtatccttcatcgtgaaatttccaccggacggtatacccaggaacatgttgttttgttccgggatctgggattgcatctgtcctccaccgaatgacggtggggcgggcggaggcatcgactctgggtgatggtgatgcctgagctgcgatggcccgggatcctgcgatcgttggtgtggatatggcatttgtatgggttgcgccttgggcgagggaacgctattgtcggggatgatcagagccggcggcgagtggggtttggtctgattgaacgttcccgacgacttgaagtgaggcgagctgacaaatgtaggcggagccatcggccgtacttgaccttgcatttgctcgataaactgttgcggactggtcgcctgaccctgcataccgcggtcccgctgctgctgactcctgggtggcggtaccgccccgctgacgggcaagggcggcatggcgagtccctgcgactgcgtctcctggtctgccgcattcatctgactcctgagcatgttcatgacctctcgctggaattgctcgtcgacaaggcttccactgcccgggacattacggttggtctcgcccgaagaggccatcgattcgagggtatgatcggaagcttcggaattcatacgtcgagcgaattcggacatgggctctttcgatcccctattcaggttcagcttgagtcctcgcggggacctctcgaatccggcggtaggaacaggatactgatttgcttcgacgccttgattcggatcgtacgacattggctccttgaccaacatcgcatcctcgttgaagatccgctccgagccgtcgtccaaggtctgggccttcaagcttgctctccactgaacggtcgcgtccgaggcgccgtgatcgtcctcgctccattgtcgagtgggctgttcgaacctccctggtcgtccggcaaagcccgggttcatcacgccgggttggccaaacggattgataaactcgttgttgttccccaacgacaagccttgcgggatcccgctcattcccattccgcccatcataccagccgctctcatcccgccgaaatcgctcccttcgtaaccttctgccggacctcctaatccagccgcaaactggtcctccaagccttccagcgtctcgagaccgccccctccgtgcacggacccggcataggaagacactgattgggcaccaaacgatcgattccgtgaatgacccccctggaaaccctgacccgccacgctcagtctaggtccatggcggtactgcgaaccgtcgaggttgagcgggtcttgactcagtggcacctcgtggatctgcgccgtccggaaagctggcgatggctgaggagagacggaagccgagtgggtcgtccgatagttgttgaactggtcctggtagggaaggttctggtgccagctatagggattgttcggcattgtaggaggagccgattggagggagaggggatgataggaaggaccggcttcgaccgtctggacgaggtcgaacgtctgatgactcgattcggccgatggcagacctgtcgagttgaggtattgcaagagctcctgttgctcctgatccgagaggtaactcgcgctatcctcgttctgtcgaagatccaagtgatcgctcgacgatgggttcgggttgtgatagctgagccgataatccgatccggactgagaatgatcggggtactgtgggtacgacgagcttgcctgctggttctcagcggcgagtcgggcgagatgtgcgagttgcaagtttctctgcgattgttcttcgacgagactcttgcgtcgagcttcttgctgtaaccgagcgatcaactgttcttccgacgtcgatttccgcttgctcggacgtctcgtcggttgaaaatgtccgctcgagctagagccttgagaagcctgctgatgatgatgatgttgctgctgctgctgctgctgtaaaaaccccgtcccaccgttcgaggaaagtatgtacgaatccccgctgttctgtcgactcggagcaccgcttccactcctccttcgacccgtgtacaggtccactccgcctccaccgctcgcttcagccttgttcgacccgctgctttcaccctgctcctcctggaccctcaagagatcctcgaaattcaactgttggtgctcttcgttcccaaacaccggtgtcgtcgccgtattgtggttggtttgctgaaaagagggatagtagtgggaatggtatggattgttctgactgggatcttcgaaagattgacccattaccgggacggtcagaggcgagtgagagtcgacgagagagttgggttggagagcgagggtatcggtcgttgcccgaatgacaagaggcgaggagatgatttccgaccgtaaatgggcagtcggcctgttgttgtgggagcaacaagatctcgccgatcgtgccttttgacagtagcagctgatcctgtcgtcgtcgtcaacttggggtcaaacctaatcacgaggtcgatcgatctttgtcgctcgtttgcctgactgatccaccgagactttatcgtttgcagagcaaagctagctgaaacctaaacctcgttcgttggtatggtgtggtggtggtcgtttgagtctatctcgatcgctgcattatatgaccttgcgagtaccgtaccggtcgtttgcgtcgtgctaattattcgatgacgagatccgatttctgatatgacggttgacgagaaagagagagagactagtagagtggtgtagtaaagttgtagagtgtagatggcagagactcggctgagatctcgccgaattgtaccgttccagtagcccagtagcgagagtctagtctgctgccgctgctactgccactactactactgttgctgctacaactgctatctctgctacctgctagctagtccctcttgtgagctcgtaaagtaatttagctaccttcgcctgtgttgtgtcaacgccaaccgccgaagcccatacggtccggccggtgtatcttgaggaagtgcaagctcgcggaggaaacgagggcgagggcgagggagagggagagaggcaccggtagggcaggttgggcgagggagagggggtcacacccattcgggggaattcataaaggggacgcacgggagcatagactactcgtcatccagttcaattccccgatcgggtaatgtaaagtaggtaggtaggtaggtaggtaggtaggtaggtaggtaggtaggtaggtaggtaggtaggtaggtaggtaggtaggtaggtaggtaggtaggtaggtaggtaggtaggtagtgcatgatgatcatcatgggggatagagagcaacacgatgggcgatcgaatgcctgggtacaacaagatatcaagagatttgagaagaacaagaggaaaaagacgggggacacgaagcggaagaggtgtgtgccgagcgagttgtacaggtcgagcgaagcgtcgcgggatcgccgtcgagtgactcaaaagaagatggagagaaaaggtgataaacgaaaagacgaaaaagggtaaagcctaggcgggcacagacggccgccctgcagcagaggtgttctcgagatccgagcgagttgaagccgacagtagggcgcaatctgggatcgccacgatcgggaggcatggaacgtccgcgatcggtccctactcggcgtagaggaccagcttgtcttcccggtccaaccactcgcgcaacgtctgatcgtccatgacgtccgagaacgattccccgccgcccgcaccgccatttgcattccggtactgcagcctggacacttgcgcaacgagacgatccctgaccttgtccacaagctgttcatacgtcactcggggtgggacccggatggcgatcatgtcgtccgtattccgatcgaggatcttgatcttgataaacgccggaccgttgccactgttgatcccgttcgagttgccgctcgccggggacgatgtctgaccaagaggttgatgagggagaggcacgctaaccccgttggcgttaccgctcagtcgtcctccgcccggtaatgccgaggcagagccaaacgacgacgacgtcgaacctgtagtcatgcccggcgagaatggcgatggcaaacccctcatacctgtaggtggagacgcgaccccgccgggaccgttcgatgaagcgggagaccccccacgcgccagttgccctcccgtctgatccaagctggacgacaacctcgagctccggaacggcgcatgacccgaacccgaacccgagccgctcagactggtcctcgcgttcccgttcccaaagaacgcctgctcgctcggggtcacgggagatcccctgcccgtgctcgagctattcctcgatccgacctgaaggtcacctaaccgatcctccagctcgtccgtccgtcgatcgtgcccagctcccaaagcttccgattgagcgctctgcctatactcttcggcgtcggcggcttgcctcgctgcgacctcggcggccatcgtgtcggcctgtctacgagagatgttctccatcatatccccaggtccgggggaaaagaatcccaagacgtgttcgtgccgcaggatgtactcggcgttcatattccgtagcgccaagagctcacgcaggtacgtgtcgagatcctctcgtctcgtattcgtaatgtcgacatcgacctgctcgagtggcccaggcatgtaaggcaagatcctctccggcggtgccatcccgctctgatagctatcccgcgatccgccccgtccagcctccttggggaagagatcgagcaaggtgatctgaaagttgtaaaagtcttcgtacagccggtagagtacgagcgagatggcttgagcctctgggtcgtcgggcaagaagagggcgttgatccggaaccagtacgcctcggcctcgtagtggaaagactttacgtgcgtcgagatgatctcgccatcgctcaacatgaactctgtcttgacaccctcgtccccgctggcctttctctcgggcgtgcctcttgagaaactgccctgatccgacccgtccgtgtgcctttgaccctgactcgactggggatagtcgaacgatccgagcgggatgctcgccgccttgtaatcctcggccgcctttttccacgcctcgacctggggcacgctaccttgctgcagcagttcggcgacattttcgatcggacgggacgtcacgggatcccgaatctcgacaaaggataccggtatcagaccgggacctccgagtcggccgatcggtttggccacgaacctgtcgggagaggcgggcggatgattttcagctccagactgcagagagcgagcctaaacagcaaatctgtgatgcaggacgtaccactcgtggttactctgagcgataacaatgatcggctcgcctgccttagcgttcaactcgtctggccgctccgcctcgaaatcgtattgcacgatcgcgtacagcctgccccgtgacctctctctcatatcagctaccagcacacctttgagtgtgatgacggtaccactcacggttgacccttcttctcagccattgcaccggcggacgatcccgtgctacccgacatgacggacgccccgctgtacccctgctgacttggcatccccaccgactgttgcctctgacgttggccctgcgggtacatgcccgagggacccgatgactcgttcgaacgcagactaggagcttgagaagtttggcgggacatggcataaggcgtaaaggcattaggcgactgtggtcgggagctgtcgggagagacaagggaccggttgtcaaccttgacgttctgggaatatgatggtccgaaagctgataagagagacttgcctgtcggtcgaaccattcgaggtatgacccgtcctaccacccttcttgaactcttcaaagtgggctttcggaacccgaccccttgaattgcttagaggatctgaaaggtaggcatgcacgatcagtcatctgatatccttgtcattccggcaaacgacgtcatcatgcggagagtggctgcaaggtgggcatgatgggaagcgaagcgtcctactcatgccgctactcactgagagctccgtaccatccgtctggctggacggcgtctccggggtactcatccgtgacgtagtagaaatcccctttctggtagctcaagatctgggggaccgtactttgatagctgtgcgtggccttgatgaccttttggggcggagcgaccttggctgagggtcgggatagcgtcggatctccgtaacctcccatgatgggagcagaaagaggggtaggaagggggcccgtgacggaatggccttggtccttactggacttgtccgagttgagggaacggcggagcgacttcatctcctcgtaaaagcaaagtcgaagggtgatgcgtcaggagcgttcggcgacagattgatgggtacgtgtgtgggtcgtctagtgcagagtctcaaagttcacaagcagtgcaacgtgctgcatgggcgtatcgaccgtagacgacatgcgacctgatagggttttcgacctttgagagggtggtcgacctaggtctgccctagccctagcttcctcgcgtgagcagctcgagcgcgtacgggtcggcaaattgacgcgaccgcgaccagagagagagagagtaaagattccaacggggtggcaactttaaggatccagcctcgaacaccggtgtaccgcttatcgtcacctgccataatccatctcgtgaggaactatagatcgcgagaaggcccataccatactcagatgacgaaggcttgagcgttttacctccctttatcatccgaaacctcggttgccaacctcggaatgcggggttgtgtggcagagcgtgccaattgtaacgacagaccgaatccccgggaaggtcagacagcctcatcgcagcttagagggataagggccaatttccgctcaacgttttatcagtgcaaaacgtcatgcgtggaggagcataatatcgcaggagaatgcaaatccgcgctgccctccggcggaactcgccagccatagcaagagcaagtcgcggcgttgaagacgaaggactttgatagatgcaggacctaaggacggatttgtgacctgcagtcaatcccaggtcaaggaggttcctcaaggcgtggttcagagtggtaccgacagtggcaaacactaatttgcaggtgatcgagtgttgtaacccggtctcgatataaaatttcgactgttcagtctctcccgtctgacactcagaacgaccgattgcgctcagctgattcacatggtatggtttgcgcatctctcgttattagctcgtaatcgatgcagcaagacggtccttctgcgctggatggcgcatgaagcaacatgtcgcgcccggatccggattgagcggtctaccgcgacatccgtattttatttacttggctcatgatttactttagaatcgtgtcgtcaactgaggaatagcgataataagattgggaagatgtaagcacacctctctttttcaagttatcgagcctgcagagattcagagaggcctgaggagataaagcgaaacacgacgttgtgatgagatctgattcttacggcagatcgtaagcctgggatctcgcacaccgcgggtttgagtacgagtatacttagaaagtagaactcattcaatcgatcaatcgtttgtttactttctgtttcaccctcagcgctaatcgtacaagtacctgtctaattgtctaatcagctggttcaaatcgaatcagccaatcgccaactacttatatatgtatgaagacggcgataacaatctcgttagcttatagctaggccgacttcaacatcaggtatacttctcaccaactcgaggagcgtgcacagatctgaccattcgcactaaacatgctgaaatgctaagacgcacgcagcgggacggaagacgtccatgacgggctttcccgtaaggggggtggagtctcatactactaaaatcacaacctcgacccctctcgccgtcccgaaatcaccatcagccgaatcgaagcgtcatgctttcgcttatcgagtgatcagaagagaagtcaccgcagacgacagggttcgtgataaaggaaaccgaagacacggcactttacacttcgttcccggtcgagctgccgagcctttcttgccagacttgacgtacagtacttacaatcgtcgttacccgcacgatgcccttgacccggaagaggagcgcaagcttggagaagaggcggaagatccggtggactttaacgaagaggcggattactcggatactgatagagaggagaagtgcggttcgcgagggatgacaagttcacaagtcactgcgaagcacaagttttcatcgacaagtcccccggtttcacgattgatgcgaagagagtcaacctgaatattgagcaagatttgctgattgtaagcaaaggaaaactcgactccaaagttatcgacatcgtacctgatgagggtagcatgtctcaagaagaaattcgaactcacgagcacgtctgcagatcctcgtagaagatatgaaagacaacttgacaacgctggagacgattgtcaaggagatcgcacaattccctaatatcggacgcccagtgacagacttgcaagatctgttcgtagagttcgcaaacattattgcggcccaggttgctggcagccggtctgaggtaaaagaagagcagcaagagagcagtagtgtcttccggagtctaggttcaatcaacatgtggccaagcgagagttatgaagaagtgtccgtcaacgcgaagatgaacaacaagatcgccatccggccacatgggccaaacgattgccaagactactatggtacttcccaaatatcattgtcttttggtgaggtgaagactagctcgagtatagatttatcggatagattagttggacaaattttacggtacttttttgagtaccctcggcctcgataagcacgttgcgtgcaggattaaccgtgcttcggaacttgccatctactatatcagagagagataatctctcatcacgatatctcgggcagtgctttctgctttacgctctgtggaccatgcctcagattgtggcacgcagacgcctctacgtacggctcatcgactgcctactcttttcaaaacgagagagattacagtaagatcatcgacatcgtcgctttcctttgtggtccttcgcacctagtgttggacacatggaaaccggaggcaggtaccactctccaggtgcagacaagcgataaccagacgatcggatacaccattgggatgtccggcagatggccgtatctgatcaactttggggctcacgcacggttgtctgggtgaccgatattgaggccagatcagatgcagtaccagcgcttccgaactccaaaggcatgcagctcgtcatcaagagtacttgagttccgccacacctctcggctcacgaacagacggtactagaatggattcaccaggaaggcaaatcggagccaaagtctcacctgctggcgaatatccccatcgctgttggtgcattactcggtacgaccgcagagaatacgagactaaagggctggaccagctttgacaagaccttgctcaactcgacgatggccacgttttctgcaagcgcaacccgcactcccaaagctattgccctaaacgagctctgggccgtatacaggaacctcgtcgagatcttggagctcttatctcgagtgggaagtcattaccgagatcttcaccccggaaatgttctgatcaccgaagctcagggcgcaaaccggtgcaccttgatggattttgggcatgcgcgcgtgttcaaagctagaagaggatatatcaaagacgtcgatcatccacccgaagagaacgagggaaacaagcaggattgtcgctcgagcaacgactttttcatgagcaggcgtattcacgagctcacgagggagatggagcgatacaatcagaaaatgaaagagctcccggactacaagagaatgaaggaaaccaaaccacgcgtaatggagccgctttgattgcgaacagaagcaaattctacgagtaatggtacaagcgtttggaggatagagcataccgtcatcgatacgtagacgatcttgaatcggccatctacccgatcttatacctagtacgtgctgaggcttccgcaggccagcagacgcatgctcaagcctagcctactttctccccaataaggcggacagtcgcgacactggtagccaggagataccaagctgtgtgcgcaacattcgggatctcgaggtcaaaaagcgcctgtgggataatgcagaggagttgattgatgtaagcttcttcatcagcaaatcaagctacctaagtcctgatcactgctctccttgtcaaggcatctacccatctggaaccttacactgctgcgattcgatcttgtcgaagaagtcgaccgttgtcagaaagatctgctcaagtcagattccggtggcgatagacgagacccgcgggacactcaatgctttgagaacgtcatcaagattttgaaggaggcggagctcgaatttgaatctgagcgcaatgcgctggagcttgggcgaatgagattgtgattccctgactgaaggtgagctcgataatgacgtttccttcctggcacaaacggctcattcgttgagtctccacggacgccaccagaagtgtattttctttccgcttcgactcggaactcccgctgtcgacgaaattgatacgacaagctatccgatccaccacgaccctttttatgctagagaaagactgtccaagttggccagctgactaccgctctgtaaccagacagatgtgtaccgtttagctgtctcggatgtccgcctgtaccattatgatacagatcagacgacatttcatcgggatctcggtcgtttccgtctcagccgaaagccgaaagccgaccgaaaggctgggccgtccgatctcgcgccagtctcgtatctgactcgacctaaatagcttctggagatattcctatcttctcgagctcgagctcaacgaaaggtttctcgaatcgcacaacaactgagaagcctcgagagaagcctcacgtacaccttcgttttataacatcacaagcaagaaacagcctattcgaaatgaccaaaggatcagaagtcgtcatcaccgggaccaccgatctgtcctctcgttatgttccggatcacaaactcagggtgctcgatgtcagtgcaatagaagaatttcagcatgaggagctcctgctcatttgtccacctggcgctcttgatctttctagccctcgaaactcaaagttaccaagactcaaaaccccaagagtctgccggaggacatgaaattcgtttggggtgcgacctttgtgagtgcccatcgtctgttacaggcagactaatctcgctcatcgaaattttctggtagaccgaccacatgctcatctgcaagcacgacccagagcttggatggttggacccggaaatcaaaccctacggacctctcgaattggatcctgccagcacctgtctccattatgccccagcgtaagtttcctccttgctccttgacaatcaaacagattcataacaagatgaactagctctaacaagatttttcgttgtccagtcttttcgaaggcatgaaagcctacaggaccaaccaacccgggtccaagcctctcttgttcaggccagacatgaacatggcccgtatgcgacgcagtgccgatcgggtacagctgccggtgagttgggacttggtgtgaaaggagcttggaggttcgaatgcaagctcatgtaaacttttatactctcaggactttgaccctgaagctatgatcgagctaattcgtcagctggtgaaattggacgagcacctgatcccccctccaccaaacgctctttacattcgaccaaccatgtgagccgtcatctaaatcgatcaatgaacgacctcagttttaatctcattcccgattttgtctcttcctctgcaggatcggaacgagacctaccttgggagtcgccccttccacccacgctatgatctacgtcattctctcgccggtgggacccttcttccctaccaagaacaccgccggtcctcctctgcccatcccatcggttgaaaacgtcgcttttacgaatggctcgtcgtccgaacccaccgactctgcgaaccatctcaatgggacacacagcacgatcgaatggcaagccaactttgacacaatctcgttgttggcgaccacctcggccatccgggcctggccaggcggtgtcggcgagtacaagttggcgggcaactatgcgccttgcttcaaaccccagaaggccgctctggccaagggataccagcagaacctttggtgtctcgaggacagggagggggtgatgaaggtcaccgagtgtgggcagatgaattttatggtcgtcctcgagaagaagagggacggtgacatcgtcgaggtcgaactcgccactcccagccttgacggaaccatcctgccaggagtgacggtaagtgatcgagccagagaagtctttggtctcgatcaggatgctcatgcgatacgatgtggcttgtcgtcgcttacatacagcgagactcgatcttgacattgttccgggctcacgccgaggccaagaaggactcggatcggttgcctcacctgtcgtcaaacttccgcttgaccgtctccgagaggcccatctcgctcgaagagctcgtccaggctgcaaaggaaggcaagattctggaagcgttcggtacgggaacggcggcggtcttgtgcccagtcaagaggtcggtctgcagagacatgatcatcgcgcgctcaaggacgatattaatacgattgtgctctttacttctagaatcgggttggaggacggaaggcctgatatggaagttcctgtatactctggtggtctgggacccttggctcgagccgtatttgagcgcgttgccgagatccaagagggcaaagtgcccggtcatcaatggatcttggagatttgatggcctgatttcttgatattatagaggaaccttgcatgactattgtaatagcggctggcagtcgacagcatgggatgatccaagcgtgccggacgatcgcggacctgttcaacctggcgtcctcacttccgcgcgaagcgatcacctcggcacgaaggtccggtggatatgtgttgacgcattgttcggagtctgattgattcgtttctgccagatatcggtatacagcttgacaactatccatctatacaggaggcatctctaagggtggttcctgacaagggctttcgtttgcttctgcttctgctatctgtttgcaaagctatgagctagacattgcggtaggaaagcaacagttgccgccgaagacgacaagacatcatgttctcgatctcgggcctcgggaaacagctcaagtctgctgcagagaactttgagcaggcaggacatgcacttcaggctagagtgagtcgaaacttgctcgtccagctgacacttccggatgactatactcagatctatatcccctccaggctgctcaacagcagcaacagcagcagcagtcacctgccacaccgccgccagggacgcccaagaacaagaagcccgagtctgatgtacctccaggtcgatcctcgggagagtccagccgagttcctgcccagaacaatgctttggccagtcgtctgagctcgctcatggcggccaaagcggccagaggagcggccttggaacgcagtgcatcgcagagctcggctgatgctgcgaaagagaatggcaaacccgtcatccggaaggaagacctaggtatgcagttagacagtaacaatgcggtcgtcaggctgactaaagaatctacattcgcagccaaactggacccggccgatataccccttcccccatcccccgacttgcgtccgagcgagatcccactgccaacgaccccacaatcaacaggagccactcttctttcgccggaactgaagccgagcacgggcacttccctgttcaatacgcccagaaacctcgtctctaaactccccagcatcgtgcggactgctacgccgactataaacggaacaggaaagaacgctccggatgggaagagggtcgattctgatcgagacctgtttagcctcggtctgagtgggaccgggactccggctgtcgacggagctgggaatgagaccccgggccataccttggcagagaccgaagcgcttctcgccaaggtggacgagcggacacaggcattgtcagagagcgaacctccggttgacagcacattaatggacgcggacaaggctggtgaacctgcggccaagtccgtagtggactctgttgagccggagatccaactcgaagacgtttcttccctttcgcgtgaggagctcgagcagaaataccaggcgttggcggaaaaggctggcaaagcagacgccgtactcaaggcaacctcgccgatattgaacgagggtatcgctgattctgatgccctggaaggatggatcaagatgatcaacggaaaggtggagatgggtccgaccgagatcaagaggttaaccgacaagctgagccgttagtagcatttcatactaatcgctcctcaaagatgcagatctgaccctttgtcaacttgctacgtagttcaagaatccaggatcgaagaattaagagatacccataggatggagcaggcttcatcgaccgccatgatcgaatccttgcgggatcaggtcgccaagaacgaatcatctctttcttcacaagcctcaaccgctctccaagttgctcaactacgcgccgacctcgccgtgtcccagtcccagcataaggaagctgatgaaaaactgaccaaggctgtcaatctgctcaagactgtgcgcggcaagctagtcaatgtacagcgagatcgagaggaagtctcgaaggctctcgatgaagaaaagagagagaggaccaagttggcggatagcttggagaggcttcgagctgaaaaggaacgcgaggtccagtcgctcaggcaagcatacgaaaaggagacgcaagggctcaaggacaaggctgcgcgagagagtctggccgagaagcgcaagtgggagttggagattatcacgacgaaggttagcaaatatacaaaggtcaagggggagatgtattcgctgactttactgtgcacaaacaggcaacacatgccaaagagttggctggcaagtccaaacacctcaacacattgatcgagagtatcaaggagctaaacgaggagaaacggcgccagttcgagctactccaaagtcggcaggaggaaattgagacggccactgctgccaaggaggtctctgaggcaaaactgaaggagatcacgctcgaaatccgagatgcgcaggaacgagcgaccttggcggaagatgctctggctgacgttcagcgcaaattcaacgatatccaatctattcagcgaacggaacaacaaccgaacgctggaagtggttctgcagggtctattgccaaagctcgggatgaggcggaatcccgcgtcaaggagatgaagaacgagctagtcaagctggagcgggagcggatcgacatggaggaagaacacggtcgtcaactgcgcacgcagcggtcagaaatggacaggatcagagcacttttgagcgagaagggcaaggaagcggctactatcgaattggagcaaaaagatgcccaggagcgtatcagaggtttagagagagaaagggaagctctatctttggacctggccgacgtacaagctaccttgcggacggcgcgggaagcacacgccaaagctagcgacggagaggtaagagtgtcccgtcggaggccctctgtgtagccggcgatggcttatcttcttgggcgtgctagacttcggtcaaacaagagactgatatgctccgagaagaaatttcgagactctcaaacgaagctgaagatgcgaaacagatggtcatccaggccaagaccacaaatagagcaagtcctccgcctggacgacagataggtatgcggctaatcgtcagtacatggtacagaacttgcgagaggagatgcgtcgtctccagtcatcagtgcaacttctcgagagacagcgcaatcccggcgttggatattggtcagcggggggtaataatcaagccgctcgaacggctgcggaggtgcccgcggatagtcgcagcagtatcgattcgaccaggcgagcgggtaaagagagccagccgtcaacacctgtgttaagggaggctgcttcgccagctcctgcagatgtgacaccgcgcaaccaggaggaagaggttaatctagaggtacgcgagttgaccactatctcttggagacgatgctgaacggcctgtcgcccatcgcagtatctgagaaacgtgattttgcaattccttgaaaacaaggagatgcgggtatgttccgtgcgaatgttgggcgcacttgtgcggcccccgctaacgaattgtgcgcgaacagcctaatcttgtacgggtcttgtcggtcattctccgcttcactcctcaggaactccgccgcctcaacgcaaaactttcgtcgtgaccggagatgaccttcatatgcgcaatgaacgaatattatattattgttgtatttctccgtctagatagcgtaaacaaaagcatgtttcagaaggagtcttgctctcctgggtctggcttgtttcgcgacaaaggatgactaactaacgtgagactggagtttcgaattgatttaaacggctaaagcggaatcaccgaaccgtctaggcatgtgaacttctggcaaactcacaaaaggcttgccaatagagattttatcaagcgcagaatcgaccaaccgccggaggggacccgctctatttttgccaagatcacgatgaattcgtacgactcggactcttcttctgtcaacgaggatgagattttgcacgatacaactacggaggctggactggatcgttggcatcggctgccgggagagtttgatctgttcaaaggggatgggagacctgacagcagatttctcgctcttggtgatgccaagctgcccgtcttcgatgagctgacatcgtggatgaaacgatcgaacaaaccgcctccggatgagatattccgaggccgttcaggcttccatccagaagacgccgagaaaaattatttagccgccgagaaaaggttcaacatggacataccagtgccgggcgtagaagccgatgtcaaagatcgcgagttctacgatcgatgggcggaaacactggattttcggtgagttaccggcccagttgcaaagaaccccgtgattgaaatctattcccaggtggaaccatgattttgcagatctgcgacttcggcgagctaggaatcaaggttggaagtggagactgatcagaatacggcctgacggatccatagtagtgtgccctttcatcaagccagcccaaagacctttccgcgagcgcggacagaaatcgaccgatgtgtcacgaaaccgcactcctccgcacgaaatgctggacaagatgcgcatgcaagctcaggcccgctggaggggtatgcctatcaccgatgtaagcccatccgatatagcggtgtgtccggctagttcagcgctgagtctttgagatgagcaaaatagaaagaagaaaaggaagacaaggccgctctacgccatctgcgctacatcgagggagtgagtcatgccgatccccttgttccgcctgtttctcgtattcaagggcatttgcaatcagctcaagaatggttatggttttttgggcgagatgctgtgtggcatggcagctgacaccggctccggtgtgcggatcttggttatcggattcttggtttcgttcaccttgcttttctgctatggcccgcctacacttctcccgtttctttcggagtttgtcacggctatcttaccgcttcaagcgactctccggggtgttttgacgtccgccaacgatatgaaccgctctgcaggcgatgcatacactgagggcaagtcgagcgtcaccgcgaactttacaatcgcgtttcatgctgctgatttgcccgtacattagggaacgtacggcaatggctcttatattggcctctgtaccaatttctaaggtacaaatcgaggaccgtagtagcgtgattttgtcgatctgactaaaattctgctcgaccttgacgcagatttgttcaagggtgggcatatctggtccgtccaaagtaagatctattagagacgcaaaagaaatcataactcactgactaaataccaacgataatctcagctggtacagggcgatatgtggatggcgcacgacagtttgcatgttatgtgcaagcccattctttgccgaccattcgatcgtgagttgtcttgcgatcaagcaagcttcctggatctaacaccgctgttatcgttcagcacccaatcgatgcgaaagaaagtcaaactcgtctctgtgagtagtcggtggcatactacttgtttgaagatcaactaaatatcaaccgtcgatcacaacgtttcaagtgattcggatttggagagatcggggagaacgcatggccgaagaggccgcggcctttcaagctacaaaggtgctggctaccacaaaagggaagagcccggcaaaaggtcgtagtcataatgggggttcccgcttctcgccgaaagaacacgctatgtcgctgttgaacgaggcgagaatgcttcacggtctgatcgaggagacctggagaggaggggaagtagctcctcgaaagatggtttcaggcaagtcgtctttcagacccattgaccctcttgagctatgggtctcagccttcccttactttcctagcaacggatggaagatacctccgccgtgctattcacgaactcacccaggtcatagacgtcgccgacaatctctcgaaagcagacccagaaaaacaggagaaattcgagaaggcctgcgcagatctggagaaacacattggcaaggcgtacactggaacacgttcgcaagcaggggccgaagccttccgaacgcatctaaaacatatctatcaagcatctgacgagagtattgctgaatacctccatgccctctccattgaacgcggagtcgttgcgtcgcgtagaaatggcgcgaacaaggcttggtctgatcaccactttcgggaacagcatgctctcactcagcggaccgaagtcacagcgaaggatgacagaacgaaaattgtcgttgaatctgagaaaccattctacgaccctgagtatagttacgatgctcagaagtcgctttctggtatgacgcggcagttgaaagacgacttccgtcgagctgtcagtggcgacttgactaagcggagggagattatggaagatcccgcccgtaagcaaaagattcaagaagtcttcaacaacgccggctacggcaggggtcctgaagctgccagccgtcaaccttggaacgtcttaaaattcgctcccaacgcggcgttctccgaggatgtgtcgagtcttatcgaggaggagaggcgtcatcccggaacaggtcttatagtatgcttgtcttatgtcttgacccttcggtcgctcaactgacagcgcccggttgttctttatttagcaacggcccggggctgggactctgccggactcgatacatatgtacaacaagctcactatggagcagcgtatgaggggaatgagctaattcccaaatacgctatggctatgcttttggcttcggttctttcgcctcatggcttttgctttctgagagttctgcatctcgtggtactacgcggaagaagtccttgactgaggttgtttgcttcggatcgactgatttagccttggcggcaggcttgccttctccgcttttcttccgctgtgaactttcgtcgattcccattgccacgatcagcttctcaaactcatcctaccgaacctacgtcagtgaaacggatcttaaaatgcggcaaacgggtctgtcaattcgattcaccttgtgaatgatgcctccggtcgcctctttgtgccctcgagcgaaatcatcccccactcgttcgcggaagccctctatcgaatttccgtactctttcagcaaggcgatcagattggctatttatgcgaggagattagtgcatacaaatagcagaatacgtttcactgatcaaatacttacgtctctcttcatctggcaagcttctcaggccggacgatactctgcaggagaacgacacctttgtcggatcagggttgaatcccgtattcgcgcactgcacagacaaacccggaacagatgagatcgagttttattccacaacacccagaaactttagggggacgtaccatagtcatcaacatggtctttgcgttacgtaatgtccctgcccagcgcgttgcaatcacaggatggactgcgaattatctccttgtgagttcacactggaaacatgcactgggaagccgacaacgaactttgaaatccgctgtcgacgcgtaacagtgcgaccctgccatccgcggagaaccgaggagctgtagcggaggtatgagacgaggccaggaaccttttgaaataaacgccttgcactcacgaactcgcgcccatttttctatttcgtcgtttacgtccaagcgacagagcttcagccacgcgtttaacgcgacttctcttgggttcgatgcagctatcaagatctacatgagaagttaggcgtggaatctgccttttcgcaatggtactcacatcccaagctttcttgactgaacagcaaggagtttgcgttagtctggtaaccaagggttgtctcgaagtcatttaccgttatattcggctgtccgtcgaggagcgttgacggcgcctacagcatcggcaatgatcttactgccatatctttagggttcagataatttctaagcgtgatggtaccggcttcctcatatcccgctaaactcactttcgagaacacacggctatgtgtgccggccatggcgcttggccccatttggtgccggtgccaagatctgaaagtttgtcgcaatgagttaaaactctctctacgtaactaatggcattcacctccgatgtagcccatgagagcagcccaatcgcaggcttcttgaacgtttggatgtagtggtaaacaggtcatatatgtcaagagagatgtcgtggcgataggaggcgtatgacaggcggtgaggactatcgcgcccggtgggaactggttaggcaaggcggattagctgtgatcgagttccgttcgacgcaccggagcactcacctcttctgactgatggtgatcgatgagcaggagcgcgctgcctccttccggcaatttgcccacgattttgccaggccggctcccttgatccagaacgaccacactctcaataccgtgcatctgtactagcttctccatggcgctcgtttcggcttccgaatggacgttggtcccctttgacaggacgtgcacgtagatgtggtccgctggcagtcccagcagctcgagcgtcttgtgcaggacgtacccagctaagcatagtcggagactccatcaatttcgtcagtcggtggctctagttcgctagcggatctcaccggatagtccatccgcatctttatcgggtaccaacagaactttccttttatttcgagcgctatcacgaaacgaaaggtgagcccggccttctccggtcttccttacggcgtcagactggtcagaactcacatgtctctgataaaattccgagctgctgcaatggctggccttggagcaggccattcgagccaatcatctccgaactcctccgctgcactctgaggaaccggtccggcaatcggggagaatttggcccgtttcctggctgatgtgcgggaggaaggacatcaacgatcgggatgtatcaaacgtgttacctgtgtacgcgagacttacgggtgggagctttgggagatctcttctggctcgaggcagtcttggggctgacgggtttgatctcttccacctccggactgctagagaaggatctcttcggcatctgtttgatagtcgtttgatgagtaccgaggagatgtagaaggctaaaccgggtcgacgtgtgcgagcgtgtagttgatccgaatagtcttgctatcgaatgcatggatcttggctagctttggtccatttacaagtggaccgttatcgaatggctgagcaaactgtcaatttgaagggggcatcatttgcgtactgcgtacaagaacaaagtaggacatagagtcggtttgttatcaaagtcgatctcgatcgaagcgtgacgtcatccgattcgaagggggctaagcacggatattggtgtgtaggtgatggcggactacaaggtctattaaatgcgtacacgatgtgtacagtaaaatctataggttcacttcgtatgtagcagggcacggtatcgagatagtgtcaactcggaggatcgaaaagtcaaagtacgtaggtcgaagggataacccggtgaattggaggactggggcaagaagggagtgtgaggtgaattttaaaaggtagcccaggtaagggaagtcgaaaagcgttgttgctcatcacgagcaatgtcgttcgcctcctcggcttcgtccacggccagcggattggctttgaatcggaagtctacaaaaagaaaggatacgattgatcagcatcgatttcattacgagcactcaggaagcaaacttacctccatcgacgaccagcttggtcctcccacgcttcatctcttcatcatcatcgagctccctgtcgggatcgaatgtctcgcggtcataaccccaagcggaaggcacccactcccgatccggcgtcaagggacctgcactgctgttggtattggtcgacgttccgttatggccgatcgactgtagcttctgatggatctgctcgagaggtcccatcccgagaggcggcatattctgaatggtaagtcgattgcgcgagcccgatctcgagctgtctctcgaggacgattcgttgagcggtcgaccgggtcctgcaagactgccgagggacaatagactagattgggaatagagctgaggggtatagggactggaaggtgaggtgacaggcttgtgagccaaaggataggtagccaagatgcccgtaacggtcgtgctcggctcctctccgggaagatgagccatccccggaggaggcatggccgggaagtagctattgcgattcggtccctctgcaggagagcacgagttgggattcatggcttccacggtaggagagaatacttttctggctgccgagctgagagaggcttgcctactcagcgtggtaccggagcgactttgggcacgagacccggtcgtcgtgcggactcggggtttggcttgccggaaagaagctttcggcgagacgttggcgctattgatcacgtagttgtcggcagagggtttggggggactgcgagagaggggtgtcgctggcgccgaaaacattcttcgaggcggcgcccggttcatggcagccgacgatgctttccgctgctgtttcctcgcttgatactcctcgaatgtctccttgccaccgtcaccatcgtcgtccgaatcgtcagagtcttcctcgtccgtgctgggcaggtcggtgtcgttgtgcaagacgagaggccgagtcttgacgcctttggcggccgctctacgagccaaaagtttttccggatgagctaccttctcgaaacacgttgcgcagacccgacttcgagctacgccaccggtgaacctggtagcgagtgcggtcaggttgatggcagacgcctggttcgatcggctgtcctcgtcatcgtattccacagggggatagtagagaggcaaagagtaggctgaatgaatgtcacaaaagatgcctccgcagtagcgacagtggtgtttgcgaactcggagattgaattcggtgtgacaagagataaagtcacagtgagtggagagatgatccggctgcaatcaggatcgaatcagcaatcgaactcggatcatgaccgtcccgatggaaagaaactcaccttccaaagatcacggtgcaccgcacgacccatggcatttctaggcatcccatctccgtccatttcgctcgcggcaacgctgctgctgatcgatggacggcgacttccacccggcgttgaaggcgcggaagaatcgcctttgtttatcatgcctgacagtcttctgcccatgtccgagacgatcctcgctttttgaccaaggttgccagggaaacccttgatgaacgcatggaaatctgaattattgctgtccttgcgaggaatctcctcgtcagcagaactcgagatgattgtgggaatagaaacgttgctgtcgttctcgccggacttgtgattatcgtccagcccagtcgtgatacccgcttgatcacgatttcggaactcggccgtcgtcggagtcttcaagcttccatcagtgtcggtattggtcatggtcatcgattcgcgactcccggctgtctccgtactcgttctcagacggggctcgccagtcttgtctcccgtgccggagctctgttgctgttgcgatgctcccggatcattgcttcgacgaacgatcacggccgccttgatctcgccggtctcgctgtcgtctccatcctcaaacgaacgggtgcgctcatcgacgatggcaggtcctgctccgatcccgctagcagcgaacatggcggccaaagcccgctctttttccaacttgatctcgggcggggtcggcgtcttcaggtcgtcctcgtcttcctcgacaatcaagccgggttgacgaccctggggtacggtgaccaaggtcgaataagacgttcgtcttcgctcaccagaggatcccgaaccggcgctgtcgcagcttcccgaagcgctgcccgaacgagcgggtacgacgaggtgagcaggggtccgcttgacggcaaatgacaaggcagaacgctggctattggacgagttggagcccgaaggtggggataagctagagcctgctgctcgttgagcttgagcttgttgcgagggagaggcgaccgtattagaggatgcggtgtaccaggatgcaggtgatgtcgcttgagcgatttgattctccgcttgtgctcgcttggcagctgattggccggtgaaaaacagaacgacgatcagtctgacgaaacggtgcgtgggtctggacatggcaatcaccttctatccgctccccctcctccttgagggcttttctccgccgaaggtcttccttgctcccaggttgaggttgtacaagaggtttaccgttgggcccgagcggtcccttgaacggcagacctcggttggccgatacaggcaccccgacagcggcattctcagtggctgatggttctgttgacgtaggctgaagattggcaggtagctcgactccgagatggacgttgtgattcgcttgattattgatgtatggaggtggaggtgcagctcgagttgcaaggggacgatgtgcagcgacctgattggtattgatgagtggggtgggaagctgttgtggacccgtcgtggcgttgccttcattggggttcctgccgatagagatctgtctgcggctttgcagtagcgctgcctggcggtcagcgagcatgtcctgaacattcatatcgagaagagaaggagggtggtgaatatatgatgaaatgtcggcgagtcgaggtcggatcctttgacgtcaaaaggtatttgatgaggacgtggtgcgatgagatgtgatgtgattccgaagtgtaaaggaaggcgaaccggtcgtcacgcaaagaggagttgacagatccgtggcttgctcgaatcgtgttgcctatttctatgcgtttgtgggtcaagaggatttggggtgacgacgacaaggatgatggttgtcagccgaggtgaaaagagggtgatcgtgtaactttatataacgatctgatatgtcgcactcacccgtcgccggcggcagtgatcctcgttacttggacgtttccggcttgcgaagaagcgtattcgatgtcgagacaccaccgagcttcggtcagacaaggagctaggaagaagggtcctttggaagacgggattgatggataacggtttgcgatacgattgtttcgaacaagcttgtcgtctgagacacctcgtgtccaagcttggatggataggcgagttccgtcggaagggtcctttcaattgacgtatctcgattgaatccctttatatcctattcgacgtcgcgtccgtcggagaaatccaccctgacaaccctctcaaaggggcgtgtagtgagcgaggttggccgacgagtcggatcgatcgaaagggggtttcagccgcgcgacgagctggggtcacgttacgaggcgtattgcgatgtcgttgggcaagatgataggcagatccaccaaccaccagagtccgtgcgccgtcagtccgtgcgccgtcgtcgtcgctcgggctatttttcgtagaacttggcaagaggcgagccgtaaatcgtgctaccctcttgtcgtagtcaatgtagtcgtcaagatcgcccgattagcgaggatcacaggtagtctgaccgggcttgaatgttgtgtcgataaccggtctcgtcggacgtcgtttgagggtgcaggcaaggatatcgtctagcgtctagacgatcgacggcggacccgcgtggcgcaaacagaaacagcagtttgatcagctcctcattcccgccggcctgcctgctgtgggtcgaccaatcaatcaagattccggccatcaagactcactcaaatgcccggactttgatccgtggatctgacccttctatttgaactgaaacgcacaccggacgacaacagacagtgtgttccgcctgttctttgtgctgccttcctttgaaaccggatttccgtcagatccggaggatgatcgaaaggcgggccggggtggatcgtcggctaggttcgagtgatgttcgaaactctatcaggtcggtcgcggcgctctgaattgatcgtcaagccgggcgtcgcagctgcgggacagcaatgacgttgatgataataacgatggcaagaacgagcgtcttgatatgccgtccaaaaaggctcttcggcctcgtggcaaatatgaagtgccgattagggttctgtcggtttgggttctgaacgaggagactcctttctccctcgaataagctatcacaaatgatgatccttccaagatgtttggccacagagaatggtgcaggcggtatatggccttgatgacctatatctccggtcggatagctcgtggctccagaacgatcggccagcagttgagtctggtcgggggtagtgctgttccgcactatactaacgctgaactagcgaaattaggggtggtcgatgttccggggaacccgaggtagtagtgtctcaatgaactcggccgagcgggctgtctagttattattgttacacacgagtacaacaattcgacttgcagcttgtccagcccactgcttgtcgccacctcgtgcagctccaacctcgtatgggctcgtcttcgattcgcacctgcatgttgacttccatattctccgcactacgcttgctcatcccgtacgaccacggcctttcgccgctcgggacgaatcaccaggtcgagaaatcgcaaacagacttcgcttggacccggatctggttattattcatccgttcaccgacctgcgccggggggaaggcggagggaatgcgtccccgatggaccgatcgcgcggtcacacctcgcatggctgcctttcgccaacagcccgcgtggtgatgagccatcggggtctctgcgcagtcatctcgtggtgggactgtcactggaatgcccatgaatttgcttgccgaccgagctcgacgacatcgctccggtcttcttccatacacaatccgcagtcccgcttgttcaagcgagaatcgcagacatgcagacgacacgacacgacgcgtacgtgagcctttgctccgacgagccttcatctcgcctaggaaaatgaagaacccccagccacctactgtctcggagtaccgacgcgatgtcgtacgaccactttcgcccgcgttccatcgctcgttggtcccgccgagacggatcggcgcgttcgggatttatctctcggccctgcgggacgatcgatcagtggcagcaggatgagccggcgatactacacccgtacattctggatttcttttttagtttcccctaggcgtgacattcccacatctggtagggttcgacacggacgacagttcacgacgagagtacgggattgtaaataataataattgcaactgcttgctgcttgctgcttgaggcttcgaggctgtatacaaggtgcggaggtggagacgcgatcgagtggggacacgtaaagccgagccttacttggccttgcctggcaacccgttggccttgatccattgctgctgcaaggccatgtacgaagttgcggctctgttgcaccgagacgaagcgatcgggacgcgtggtccgtggcggaaaagaaggaaatacacctcgagttagtcacattcatccgagagtcacattgcccgactgccacgtcgacttgcccgagcgctccgatgactccatcgttgagactggtgatgccaaggttgttggcgggaagccaaaagtccatcgagtcttgtacgatctgcgagaccagtgtagctcgttcgctgcaatgattcaaggaactgaagcatcagcggactggatctctcggtatctccccgacggttgatctcctcacgtgagcaacctcttgccctcttcccgcctttggctttcgtctccaaagtccggtccgcccttttctccgctcgacgagatcgatcgactaagcgccagtctcctgccctcggcccgaagtcgcaccaacgaagatacagacgagaccagggaagaaatgatcccgtacatccagaatcgctgcgagatcttgttgatccgttggtgcttgctggaaggtacagtgaggtcaggttttggtcacttgacactcggatggagactgttaggtcttactcggcgtgaagtcgcaaaaacttgacgctctggagccaaacgatcatgtcggtagacagatagccggcgtagcatagctggcggacgacctgggcaaaggaggccaaaggagaggctagtggggtcaaggaccgggatcgtctgtgagacggcagcggaggacggcgtcagcgattggatgatctcgaagacatgagcagtgcgttggcacggcttacaccggggtgttggcggtgttgagagccgattgaaggtgctccataggcttgaccagtcgcagcactagagtcgaggccgatatcggtcagctccctttaaaccgctcgacatggccgcgatgacaacgcgacggactctttcgtccactagcaagacccgacttgagtccgtcccatcgcatagcagcctccttggccgtgggaccgcccgaacggaggatgtaccatgcgataagacgggatgcgtattgaatcagacggtagacctatgagcgtcgggtgtgagcaggttagacggctcgacattagcgtcatgagggtctcgacagatttgaactttgtcacaccttgtcccgtccgacagtggtgctcaagactttgagtgtctgagagactttggggtgtagcaccaggtgggcaacgagagcttgggacatggcgtgacgaggtggggcgcggcgatgggcgtatggatcgtcagtggatggagggcgaggtggtaatgcaagctaccaggtcggtttgtcttgatatcagtggctaccaaaagttgtcgatggacaacttcggtgctgatagactcggggtgacgataggtcgatgtgacttatctcgctgacttccggttactccgcactggagagcccggatgagcgtcgagaggggcccggatcgatatttgcttccgagacccccggcgtttcgcaacaaagaggtcgttgtcgtaagttcaatcgacgatcgaccctacaagaacagcaacgacagcgacaatcaggtgatgggcggctgataaaggaagggaggtggcaggtaagaatcggagtgactcaggagcaactgatctacattgatcgttgtattgttattgaccctccgattataaactgccttgtcgaaccgagaagcatcgatgtctgatttgcatgtatgtagtttcgaggtgaacgctttgtatagcgcaatccgtcaacgaactgaataccagcagcaataaaatcgtttttcaaacaaacgcacggatcgaaacgtcgatatggatcaagaagagaagaagctcgacgtacagtgtgggtgttgtccaatcttcggctttcacccggtttgacggacagtgttgccacgtagcgtccactctgaagaagcgtaaagcgactgcttctgagggtacttcccccaccaagcgtaatagagccaccaactcgaatcaactacctccccctgggtttacagggaccgtcctccctgctaatcaccctaccgtaatctacgagattctcgaaagggcgatagaggaagctaccccggaacaccgaaagatcgttgcagagaggtacaggatcgaggtcaaatacttgcattatgcgtggagaactatcaagtgggttcaatccaagctggagatgccggcgagggctgagatcctgcagtgaatggtcagaaagaacgcattgaattcgttcaaggcggggcaacagtagcacgctgcagagcgggaggttataagatgcgttccacagtggacggaggtttgtccggcgtagacaggggctatatcacatagaaatggtctttttaaggtagcttgtggtatgatattcgatggtgatacatcaaaagaagcagtcgagttggtgaagcgtcgttcgtcggcttggaagtgaactcgactttgccgtttgtttggtatgacaattcgtgataccgtcccagtatacagcctatatcgatggtgtaatctgatgagtgacgacatgaaacgttgtgtagggaaagcagggtagtgttggaactcgagcttgggcaagttcctcgaggtaaaagtttggacagcgatagctctacagctcgtcgtgccttctcctctggcagaaagaatacgaatacaagcaccagagaaatgtcattcggttcggttgactcaggaagtgagctgagtcgaaatgagtgcacaccgacttataatggcataagggcattcttcgcttcacgccatcaaatcttgaacactgtattatgtaagaagaacgattagaaacatgatggcggagtaccgaagtggttaacgggatgcactcgaatctattagaatcgtcatgcattgctctctgggcgcgcaggttcaaatcctgtctccgtcggaaaatatctttttgcggtctttttgcagaacaatatgggttaacattgttcagcctctccgtcctctgtcccctccctcctgcgtcgcaaacacaagtcgttggcatttgcacacctgctgcaaactttgtcgctatcgttgcttgaagaaacgccctggctatttctcatcgaaacggctttccccatctgcagtcaacgcatcgcgcgacgaaacctttcaactacatgacggtaggctattctcccccaaggaatccacatcacattcatattgttcgacattcagctacatgttcgatccgtgccccgggcctaatcatcgtcctctcccctggaccccatggccgactcgtcctcccgcttcctccagtccatccagcttcccgcatagttcctgacgttcttgtacccggcctcctgagcctcctgacaagccgtggcgctcctcttgcccgatcgacagtaaaagatcatcttttgctcggggagaggtttgtggaacatgtgttccttgacaaacgatccgttgtcatagttggaggagaggtgtttcttgagcgtgctcaagggaagagacacggaactggggatcgctccgagggcgacctcgtcgggttctcggacgtctatcggggcgaggttgcatgcggaagtcagctaaaaggtatcttacctcgcatagcttgatacataccaacgatcaagacgtcctgaaagagtccactcgacacgtcagctgaacggtccgacccaactatcgccgatcctactcacatcgctaggttgctcggtgataggcttgagctcctcgtacgagacgatgctctgtccccaaggcttgtcgagagacttgaacctgactccagagacagacaacgccttggggacgctagggacgaagcggctagcggcgggggtcctggccgatgcgaggagggaaaggtgtcgagcggattgcggggcgactcggacggtcctcgcggagaccggtcggaggagtgcctttgagacggcgtttcgtgcagagttgacggacatgttgattgtgtggcaattgtgatttgcttgaccagattgctgacctatttcgtgacaaaccaacagaggctttggacgccgtcgaggtgatcaagtcctcacgtcgagcgtcatactcggtccgtcccatgacctccctgcccgagtgcttcgtcacgcttcgagtgagccacactctttgcttagtcagcgagtttgttgggcacgacaagtcatagttgggttcaaataaccgccagagtcgagttgagcgattccatctcgatccatctgacgtattctcgctgcaaggactttcatttcccctcaaagcgtcgtcgaaatccaggcttccatggcaaagacgtgactggcgcgcacagctttcccgtcaacttctcaaatgtcgtggcagactggtgaaacgtcacaaagcgggaatcatcaagaaccacgatgtaacattgtgcagcgaatctgtgcggtgaaaacgcgcaatctcttctttgctacatattgtttcgttcaatacagctcgactatgcgcacgttcatctttgtgaccgacgcatgccctagaccaagtcctgcttgaggacgtatcggtatcgcacagtgttgttcttgacgctctcgacggcctctccggctcgggacatgggcaagatctcgtgaatgatcggcttgacgttcttctccaccatgagatcgagcatctcgagaatttcggtctacaagacgaggggaaaaggtcaataagaaaagtcatgcggcgtagaccttgtggttgcttaccttgcaagcgatgtgactggtggtcgtgatgaaaggaaacacccgatcagcaaggctctgatagtgtgaggttgagccacaagactactcacgatcctccgaaagcggctacgacgagggagaaagcaatgatatcagctctgaggagactgcacaaagccggacccgccactcacctccgttcgaagcgaacgcaaatccggcaacagagaaggggtcatcagggagtccgacagtggtcatcttgccgtggaccttcaacaatctgtgccagtcattacgattcagcaaacacccagcgaaggcgattcgacgtgcactcacggcaacaagtcggccagagggatggcgttggcgtcagcggtggacaagatgtagtcaaactccctgccaccgttggcggcaccgaatccggcagtcttggcgaaatccttgtcgccagtggcaatgacctgtaaaaagatcttgatcagagctgtgcgcgttgtatggcaaccgcggaaacacccaccttgtcagctccaagcctcatggcatcagcggccttgttgggcgagtgcgagaagagctgtgaagagcgatgcgcattaggaaaggatgatagagtcgcaaggccctgagcgacttacaacaacttcggcacccatcgccttggcgaatctgtagagtcggaacgcgcaatatcagtttcaggattgccgatgtatgtagaccgatcgaatgcgcgtactggacagcaaagtctgtatgatggacgtagctattcagcccattgtgtgtacgaggcaagcactagcgaaaacgactcacgacccaatcctcccataccgacgattccgaccaacttgccgggtccacagccgttcctcttcaagggagagtagacggtggctccagcacaaagagcaggggcggcgtcttgaggctggaggcccgaggggatcttgaagacgtattctgcaagcggcgacctacatgagtttggtttgcatgtcgagcttcttttagattgacgtacgcttgtcagtcctgatcatggacgagtatcctccctgggtggtcttgccgtcctcgataaagttggcattgtaggtatcgaccatcttgggacaatagttctcattgtcgttcaagcatcggtcgcacttcatgcaactttgaacctgggcaccgacaccggcgatcatgccgacctggaactcggacgcagcttcctcgccaaccgcgacgactcggccgacgatctcgtgtcccgggcagacccagtcagaggcgagaggtccccatcctccggtgacggtgtggacatcggctgtttgtcagggttgcataggctagagtcagaactaacgtctcgaaacggcaggcagaagcataacgaagtcactactcacaaccgcagactggaggattatagaagaacgacagcgtcagcgatcactgcttcggtcgaacagagaccgcggcactcacctccacagtaatcgatcgcgatggtgacgtcacggggtccagcagtcttgagctcaaactccttgacggtaaattcggtgtacttgctggtatccgagataccgtaacctctacgtttgcgacgaaacaaagaatgtgagcgacacgtgcatgaccggcagccgatggatgtcagcactgaccgtgcgtgagtagcgtcgccggacatgttgcttctagtaggtctgtttggtgttttgtgggggcgttggaaagagggtcgagaactgtgaagtgtatcgtatttcgaacgacgagtgatttccagaggttacgatgaccgcgcaagtctcctcgatgctcgatgtaaagggtcacctttctatatctttgacggggcatgagttgctgacagccgctgtcgactagctgactagttggctacctccacttttgggcgagactaggtggctttcgatcgattccgcgtgtgatgtcatacgaatcacttcccctccgaagtctccccttgccggcggggcgtgtccgtccgttgacgatcgtgttgatgacgagttgtacgcgaaacgagccatcaatggtggtctagaacagaatggcagcatgtacatatcttgtatgatgtgtgacagcaagctagtcatgcggactggcgactagacgatgaaacgatatgcaagtagagacgatgtgacggtgtgtctgtcggaaaatgccacgtcgccttgcggtctcctcctttgagcttgatcgccgcctttggccgccgctttccctcttctccccgtgttgcccaattcgtcacctcgtagatgcgatacgttcgacttgctctcgagataacaaccacatcacatcacagtactgcaaggaacaggttgggattagaaacataaataacaagcacctagtatccaggcgattcctcacgtcagactactaacatgggagtcgagttcatattcacgctcgtcgcggcactcgtcgtgctcgtcgcggccatgtttgtcggtacggcattcaccacgcccttccacggagccgtcatcaggtgagcaactttgacctggaaggcagtcatttcatctcaacaggatctctgattcgttttgcaggctccgggcgaattataatccgaaaggagtcgggctcgaagaaggtcaggagaacaggtgtgtgccgttattcgtcgctcgggcacagccttcctcgctgacctatatgtttctgatcagggttggacctactctgaccacagtccttggcacgctcaagaggaccaaacgagtagaaggatgggtcggtctctggaaaggcaagtctcgccgccacctctgccccggtcacccttgtcaccgctgcggaccttgagcaaacgcttacctgtcgtcccgcgtgctcaccttctgctgcgacttgtccggatgcatgaataggtgcctacccttctctatgctatacctcgttactctccctcgtctccatcttgttcatcggagcggccagcacaaagggacctaagggggcctataccgtacccgaggccagcgggatcaagtgagtcgacctggtgatgatagcgctgcggaatcctatctgatctgtgtgtgtctctcgtaggatggggatctttaccatcgtgctgacattgatcagtctgccatttaccgtcattatcaaccggtaagtcgaatgcccgctctcacattcttcccatctgaccccccacactggtcgctagatgcatcatcaccccttacgcattacccatgcgacccacgatcgccaacgccaagctctctctccgtctgatcctcacgccggatgagtatgctaaaccctggaccctctacatcgcccccgggttgatggcgagtgtcggggtccacgcgatctgggtgaccatggtcgcgcgaggggtcaaatggttgctcgtctcgtatgacgaggaaggtgagtcgagggatgacccgtcttcgacctccccccctttctgacacggtatgactgatccccgacgctttcccttcgcgtttcctacaggcatgatcaacagccctacgcttttcatcatcttcctcgtcttccagctcgcctcgtcaatctttctcaccccgctcgaggtcctctccacccgattatcgatccagaggaactcttacagtccctatgcggtcgccagtcaacacgagagcgggatgggtgcggccggtgccgtcttgcccgacggtgtcggttgggcgggcgtggaggaggatgtcatcgggctcagacctgaagaggagccttacgaagggtcagttgtggttacattgatgctgtgcaaagaattcgctttggctcataacgacgttttgcgcggaactcagctttgtcgacgccgcgagaaagattgtcgaagaggaaggtgctcctgccctgtggcgagcttggtggttgacggccttgggcaacgtcctctcggcattctcgtaaaaacgtctcgactcgtcaccgatacccgatcgcagtgaaaggaaatataacagtaaacgacgtggatgcatgattgtgattatgagcatgtgatacaggacgaatcgcagcaagatcgaacctggcgatacatggcgaggatgtccagaacgcgagcgcctcgaatgcaaagggagggagcgaatggacaagagtcgaactcgagctctacttgtgaagtcggttcaagatcttgaaagccgcataagcaaagacggtaccgccggcatagatcgccagtcggatgggcatcgagtcggcggggagaaaggggtaagggactgtcgccgcgggtttgtcagaaagagtcagccgcctctcaaaaaggtaaacgttcgggcataacctgtcgatgatctcacatttgccatcggaagcgcccctgtattcgatccagccggtgtatgacaagctgaacatggcggtgaatatgacagcgccaacggtcgagataggcgctcggtatttcctctccctgacaaagaattctgcaggacgagttaacgatctcgtgagcgattgcgggggaaatccgggttcgcgacgcgcaggaacgtaccgatgaaaaggaccgcagtgggcaagaggtgcaggctgaggtcgatccatagtggtagacggaacatttcgggagtgtccgaggaggaggaaggttctccgggtgcgctcggtgaggaaccgtcgatcgatgatttcggtgggaggatcaagaatggcgcgacgaggaccaagggccactgtgagggaaaagagggggtcgcgtgacaaggatcatgcatcagcgatcgatgatgagccgatctagctatccgtcatgcatgcggcaaagctgacaggcaggataggactcacgtagatggaggagatagtcacggccaagggaaatgcgatcatcaggaaagcccgcttgatactcctgatcgccgtgacaccgggcaggacatccgagaggactccgagagatgtcgtcataatggccatggccaatccccagttggtcaagaacctgtcaaagcctgcaatcgatagtcatacaattggtatcagctcgagagtccaaagcccagagcgaagcgatggccgttgtactgacccactccctgcgaggtagatcgttgcaagacaccatgtcagtgtgaccgtgcgcggattcgagagggacgacctgcttcgactgaccttttgaacgagatactcggggatgtcgatatgatccaggcctttgtatccattgatcatgagtaaagtagaaatgaattgaaagacgacccccccaattctaggtgtcgatcgaaccggtcgagcagaagctggcggggtcggtagcttggtttgtgtgtgcatgtcttgtgccatttttgtgatgacgtttgttaggtgattgtgtgtgtgatcgggagtctcttctagcttcttggcgatgtattcaggttccacaggtagatcctaaatcgtaacagacgctcagattactattatgctggcctagaagtgtgatggagtaggtcgaacgtgtaatcttgagaatgacgacgtcgacgtcgaggacgttgttggctcgggctctttggctcaaagttcacgcgaaagacgctcagagaccgaggccgaagttgtaaaggttcaacacattcatcctatgcatcccaacgaccctaacaagaccataacgagtcgcaaaacacaacttgcataccattcgtagcactcatcgtaccgtctagctagtctgaaccgacatagctgaccagatcgccctcgaggcatgtccaagtgagctgaaacctcgcgtcagctcgacctctatccgctagctgatcgtgatcccgtgaacacagtccagaagcatcacgaccagacaagccatgtatggcgtgcaaaaagagcaaagtcaagtgtgactatacctcgccttgctctcgatgcgtccggaaatccatctcgtgcgcgtacgccgtcaatacggacggccgaatcagaaagtatcacaaacggtccacggcgggctgtctttgctgcaagactcggcatgtcaggtgtgatgagaagcgtcctgcgtgcgggaactgtatcgtcagggcagaagatgtgagtcgaggtgccgcatggtagtagctcttacatcccgctgactgctcgactggcgttgctttgaatcagtgcatatacccgccagcccaggtcaagggtgcgaccaggtctcgaacaagatccacctcgcctaatgcgagggagtcttctatcgcaacaggattccatttggatgagaatctagcgtcaagaagggatcaaatcgagtctgcagaccgactcggatctagaaacatcaactcgatgggctcgactgcggaaccctttgcgttcgttccgcaagcgacccccctttcttatcatcatcctcaaaccgcctttccgagcttcagtcatgtcacggatcctctaatgggtcgttcgacgggcaaccaacagatcgcaccacatgcagaattttccccgccgaatgctgtgcagtcatacgagacgaccatacagctgtatggacaacccacgctcaggtcggataccgtgccctactctcaaccgaggcaagtgtctggtccttcaaatcaccagtataaccaaccactggtacatggtccgatattcggtctggatttcccgcaagatgacgcgcggttctccttgctcgacgacgagaccgccaacgcttcaccaaatcgagggcaagatgaaaaggacgattcgggaaccaccgtgcttcctatcttgtcccgaaaccttttcgctacgtcgaaaaccagcgaggcgaaggcttacaagatgccacagtatgtcggctcgcccttcttttccgctgggatgaccgccggacagacctcgcatcaagcctggatgaaatcgttgtggatgaacggggacttggtgaggacacccaagatgatgaggaccattgatgtggacaacctggaaggcttctttccgaataccgagcagcgacatcaggtaaggcccaaaaatggcgatcgggatcgacagaccggtgtattgacgactggcccccgcgttacgctcacagttcaagcactttacgacacacacgtgcaacatcatcttgacaatcccgacaacagcaatactgaatccctggttgaacctctttgtaccactcgccctgtcgtacccgcacggcacatctctcacctgcgatgctttccgcttggggatcctgagtctcgccacgttcgacatcgggttccggatggcgcaggcaaaggacgacgagactggaggttcgaaagaggcagacaacgtcatgtacgagctgagcaggattcaaaggggaaaggcgctggagctgttaaagatcgccaagatcgccggacatttggaaccggaaaaggccgaatcggttgagatggacatgacgctcggagcggcgttgatgctatccattcgagatgtgcgtgcttttcaatcctgacgtaacgaggattatgactgatttcttcgtcatccacagagacttgcgggagctaccgagtggaaagatccgatggaccttgccgtccgactagttcttagcatgggaggaccgaacacgtttttaaacaaacggtattcgccagaacgaaaatttattcttgagcagaccgtctgcgtggaaatcatcggtacgtcagaggtcgcgctgcgcctgtctcgtcattcacgagctgaggcttctgaattccgttcgctacagcctgtctgacggtcctgacaccaacaagattgctggggagggatcaagcttggttcaaatcgccacttcgaggtgagtctgtaggcaagattaggacgagcccgcatagatctctcgctgatagcctccggtcgtgtataaaacagctgacgagactgggcacgaccacattgagctggtatacgggctcgacaggtgagcggcacccttctcgtatgatgatgagccgcaggcttatggcagtctttccggtctgcagagacactcttgcgtatattgccgaggtgagaaatactacaccgatactcccggccgcttggcatgctcactatgtcgcgcggtaatgccagggcttatacttgtctgacatcaaacgttcggtcgagatcttgcgaatcaaggccaaggagatgaaggggtatccggaatttcacaaggcgctgttatcgcgagagtctgagatgcaggttatcggccagggcctcttggaaaaggtcggcgtcttgcgcatgtctaccctggtgagccggccatatcaaaccacaggcatgcgatgtttcgagaaactcatgcgaatcgcgtctcagatgacacctcatgcaacccgagtggtcgtcggtaacctcttgttccaagcgttcatggaactctggatcgtcgcggagatcgtcgaggatccattcaatagtccgagggtacaaggcgcggtggataccatctttgagattgtcacggaagccatgacgcgtggaatgtttagcgggtgagtctcgtactactgatattgccgattatcgaggacatcgggacgactgatcgccggtgccacgctgcgtgatctcctcttgtccgagcagatttctcttgccatgctcgtgggcagcgacgtttgccacgacgaaggaatctcgggagcgatctcgtcggattctagatctcctcaaaccgagttatcacctcgattacgacttgacgacccgtctgatccgtacgatctggacaaagtttgacattgacgacggcaagagctggaccaattgcggtcccgcgacgggtaacagcttgtcgatgggtcaggacattggggggcaattgatggattatgagaactgggagaggtttatgaaggaggaaggattatatgtccccatcttctgatttcactacgagcttgtactgatcgataatggcgaatggacttgaatccgacgatgtcctcgattgctgtctcgaaacgtttcatgaggcagtaactagtggtaactagtgattcactgatgcgatacaaacgcgaaccgcggataaaaccccgtcttggaatagggggggcgccgggattcccgaatcagtacgtagcgagtgctttcgtcagatccggagatcgcgggaaggacgcgagaggccgagagggactcgacccggactttgggcttggcggtctgcgagttggtccggggatgacgatgcttgttgaagctctggccacatctgcaatccgatcgacgttgttgagaacggttctgatgagtttcttgaggtacttcaaacccagcataaatcttgaattgaccgataattaaggatcgaaatcgacgtgataggatagagatcgctcaagacgtattcttaggacttgcccgaaccggaacgataccagcaggcaagcaggtgatttaataaccagacgatccgctcgattacctcaccaggcaagacatttcagctacaagaacaaggacgagatgtcggctagaagacactcagtagagggggacatggtagacaagttgactgcaatggggatctcggagaagagcgcaaagtacgctctcaaggtgggtcaagagcgatgaagtgggatgctacggccagacgacggtatcggtatggcatgatcgctggaacctggctaactttgagacggtgtgcgcgtgtggtccggcgaataatctagaggatgaacggagatgtggaacgggcggccaactttggtaagtctcagttccgctcttgttctttggttgttacgtttcagatttgcaaaggagggttgggggcggtcttctgcgattcaaaggaggggtgatgggatgatggactggtgatttgatgaaagggaggcatcaagtaaagaaaaaggaccggcgcacgaactaggcgtgaggacacggagacgggacgacgggccgatcatcatcatcgcgcatcgtgagattatatcggttcatcacggacccgattctccaggaaaggggggcactcgtgtcaggtggatccatcaaatctcatcatatccaccatcatatgatggtcatcaaagttaaagggagaagaaatttgcgatcaaaatgagaagaaacacgttatcataccctcgaccacgaccacgaccacgaccacgaccttgacctcgaccttgacatgccagcttgcgaagacgcataatcaaaagaccacgtagctgactgaatatccttcaccttctttctctcataccctttacgaccgctcccctccattgactctgccctacaatccacatccgcgtctcttcgtaccacggacattcttcacgaccatcctttggctatccattcacctcacgtaatcgactggtcatcgccgttggacgtccgcctaccactgtacctcctcttcctaccatgcccaaactcactcgttccttctcgctcccggtgacgttttcgctaaaaccgaaatccaaaaaacgtcgtcaacacgaccgcgatgcgtcgaccgggtccgggaacgcagtgtttagcggagaggctaataaagaggaggtaagtcggactctgactggttcaatcttcctctatcaagttgagcgtcaatgctgattcgacacctcgacctctacgtaggtaagcaaattcaggtctggtcgtgtgggtcgggtctcgagcgttcggtcgacaatgggatctacctcggggtcggcttctggatctggagctggaactggttcgggctttgttgcggcgagcgaggggtcgtccagcctgatcctcgagggcaagaacgtcggtcggggagaagtcggttcacaccctgtttacatgaagacgacagacatgcaggatgtcgaagctccaaaagctccggggttgttccctgtagatgcggtcaacaatccaaatcgtcctaacgataccaagacgacaccagaacgagaaccctcacaggacgctcaaaccctctccccactgattatcgccccggcatccgcttcggctccgagtccaatgaagggcgagacggtcacggcaatgcaaggcatcaactccgatgccaatatcagcaacaaggccggtgcatcttcgtccgcttcggccgcgggtctgcggagtcctagtaccatggccaaccctagtggactgggcgtcatacacgaacacgaggtgcatcatgccgatggaggggacgttccgcctctgattctcgacagaaccgtgcctgctcgagaacggtcgtgtatacccaccgaagagggggcggatggcttgggattgagcaggtcgcctgtcgggatcatacgggaggatgtggttgggatgccggacacgcacttgtcccatatcgaacaggataggataccgaatgaaggtctcgatcaggacaagctatcagtgggcgtgaccccgacgaacgaccgactaccttcatccagacggagtagcgtcaccttcaacgagcctcctctccggccagtcttgtctcgacaaaattcggacggcaccgaacctgtgaagatacctcagacgcagacgatcgggatgagcatgccgtcgcgcgtgatatcgacttctagctccgcctccgagagcaggaagagtggatccacggcgaaagaaagggacttgccgagatcagaaacaatgaccagtttcgagctcggttccgagtccgaccttgacgatgcgaggggtcgatccaaggctacgaaacgagtcgtaggatctggcttgttccgacgcagaaagaaggataaacgagagtctctcgagcgagattcttcggcaggcaacgtcgataccgctcgtgcaaggtcttccagtaacacgagggacgacgtgctcgagagaaagtccgcgggaaccaagcgcatgagcttgttcgacgtcggtagcaagatcaaagacctcatgacgcctcgaaggagagacactggaccgacatccgagctagatggtgtcgctgcaggagacgcttcgaatgcaccggagggtatcgacacggagatgacgctcgagcaggctgaactcgagaaaaggatcgcgcatgttacccgcacggcgaggctatccgagagtcagacgatcgagagagagccgagtcaaatacaggcacaagatcagaccaaaaccgacattgcgggaactagcacgagtcgaagagattccggcctttctgcgagctcgagcccgatccacaagacccccacgagagggatattaaaaattactaacgatgctattgatccttcttttgcttacgatgcttctcaatccgtctaccccccttcccgaaccgcctccgtcttcttcacctcgcctgctggatccgcttttgtctctccgacaaactcgcctaccggcttgatgctacccttacctatgcttgatgacggggaaattgacatggcaaccgtaccggaaccctcgacctccacgctaaccaaatcgaccgataatctggatgatctcgttatcaaccattctgcggggaatgccacggcttgccaactgcctgatatcccaaacacatcggataacgaacacgacggtgattccaattcgacccacaccgtaactccaacgtccgccaaatccggcggtttcggtcgattggcaatgtcggccatccctttgaatgaaaatacgcacgatcccattcctgtttctgcttccggggaatcgaattcgtctggcgcaaccatatcgtcgcccaaccccgaccaacaggccaacgatcttatcatgggagctctgaaccgcaagagtggtagtcatgggtcgctcggcggaatgatgcagaagtcgcccagcacgacgtccctcggatcgacaaagacgacgggagcgctcgcagcattgggtctcaaggcgatggggcccgggctgggcgggttcaataatgcagacccagtcatagcccctagccaacccgtcggcagctcctcgttcgacgattccagggccaggaccgtcaacctcagtaccacgcccccgcagaaagataccggtggcatcttttctgggtttggcggcacaaaggaaaaggagcgaggaaggtcatcccgcaaatcgaaacgagacaagtataagatctttagtcgtcgcagccttgctgcaggacctgccggtctgggagggcctcgctcgagggacacttcgcccgttggcgccttgtccgagcacgccgagtcggatggggagagcgtcaccagcagctccagaggctatcgacccaagtcaaccgcgttctcatccaagcgacgcgctggcgacaatgccgacgacagtgacgatgacgatgcgtcctccgacgatacggacaacgagacagagacagacctggagtacgacgaatcggccttgagtcacgaaatcgtcggcgaggacggttgggtcgaggacgtcttcgatgaagagaccgagaagaacaccgaggcgaacgccatctactttgagggagacgcagctggattggggggcacgggcgtgcttgaagatgctaacggggaagcggtcgaagttgaagttgatgttttgggtgaaggtaagcgaggagcttggcccgcaatatggcaagcgagctcatgcccatttcctgtttaggacccaacgtcattcgtccgcccgagcccctcttccagcaacccaccatgacccgccgagcgccgtctccggtagaagacgaagccggaaagcggaagaagacggccaaattcgaccctgaaccacttgaaacgagccggcccgaatttgggaggaacagatgtactatcagaatgactcaaggagatcctgacgaagctctcgagcaaaccggaacaaagctgcggtcgtacgtggttctcagtgatctgtcagaagaggctggttatgccctgcagtgggcgatcggtgagcacagcactttctaacgacatgtgaaattgggctgaagtcatgtccgaggtttgcaggaacggtcgctcgagatggcgatgaactgcttgtgactactgtcatggagaccgactcaaagagcaagtctcagcccatcttcttgctaccaaatatcggggctaacgaaactcgagacgcagtcgatcccaagaacgccaatgaacaagatcgcgtcaccaagctgcgtgtgcagaaggaacgacagactatcgcgcttcaactcgttcgacaagtcactggtttgttgcaaaggaccagattgaatgtgacggtcacttgccaagcaatccactcgaaaaacgccaggcatatgctcttgggtaagttcagggggtgaaaccctccgctgcccaaataccatttcgctgacaggtttgcttcgcagatttgatcgactatctggagcccaccatggttattgttgggtcgcgaggtcttgggaaattgcaagggtacgcagactagcgcagacagttgtttgcgttccctttggactaagcctgttgccactgtgtcattagtatcctactgggatctacctcgcattaccttgtccaaaagagcagtgtgccagtcatggtcagctaaaatgattccaatgcgcacaattctgcagagcgctcaaccatttcactctttcaccccactaggtcgctcgacgtcgtctcaagaagcctctgcgaaagacggatcctgctcttctgcgtcacgctccccgagtctcgctcgcaggtgcctccatcgaaaagagcgcgtcaaagaagcaggaggacgagatcctcgatgccgaacagttggaaagggaaggcgatatggccgaccagaacaagaaggaatcgacgggaggattcagttccgcatcgtgagaatgtcgcccctgacgtctatcgaatttggtctcggattgttttgcccatcacgctggcagttgtatccatgtttgccttgatatacactccggtcactctagcagctgcgaacctctaacagaagttcgctcgagccctaattagaagtctaccgtccagaccagcctcgcccgctaagcccaccgcaaagagcgtagcttttcaccgcttaaggcggagggcactagtcggtcctactcagtaggccatatttccgcttggccaaatgcctgtaggtatgaagccttcgtcttaccggtgtactctggccatgacgatgggagccgtgttcgctttttcgtctacagtatctacgtcaccacgaagcgtcgccgtcgtcgagatgcaggaagacagattgcggaggcggcacgggcgccgaccgagttttgcggaccggatccgcatggaagagttcggccttcgtcctcgacccgtacctccactcctgtcgaaacacatataaggtggaaggaggttgtgtattgctcgacgtacgacctagttccttgagtgatcttgccaacatcgcaataaggattacgaacactatgcccgcctattcgtacaatggtcgcattgactgcgacatcgatctcgatctctctgggctgaagggcaagacggcgatcgtgaccggaggtaaattgaaagcgtgttcgcacagcagaagtgtcagctgacattaactgcatcgatgtaggagcaaatggcattggagaagcctacgttagagctcttgtgggagctgagtaggtcttcctgccttagaatgcttcgagagcttcctcctgactggcggtactgcagcgtccgcgtgtgctttggagacctggacattgaaggagggcgtagattagaaaaagagctaaccgggtgagtccgaaggttcctgtccatttactacggtactgaccgtcgtctttgtggagatagtaccaaattcattaagtgcgacgccacttcctgggaagaacaagtcaatttgtttgaacaggcgaagatgttctcgacaaacggcagcattcactacgtcgtggccaacgcaggcatcaccaaggatgacgatgtcttcgcctacaaccctgatgggccccagaaaccagacctcaaaatcatcgaagtcgatatcaatggggtcatgtacactgccaagctggctgggcactactttattagccagaatggcaaggaggaatcggaatcccaggaagacacctgtctcgtgctgatcagcagcggtgctgggtatctggattgcccgcgggcccctcagtaccagacggccaaatacggcatgagaggaatcatgcattccttgcgaagagtagtccatcactatggtagtcgggttaacatcattgcgccgtggtaagtggagcgatgtcgctctcactatcagcgactgcagctaaggaatggttccgtcttcaaacaggtatgtcgagaccaagatcctgtccaaagaggcctttgacgaggtcaaaggtcttggggtcgaattcgcgaccttggaagatgcaggccagtgtctgttgaggatcgtctctgacgagaggatcaacggccattcgttgttcctctcgccgagaaagtgggccccgaggggttatctcgatttgggtctcgatgattatgaggacaggctgttgcaagagatcacaactgatcagctcaagggttccaaatacgatgaaaggctgtttttgcaataactcagctcgaccagtagtgcacatttgccggaataagacatgtatattgtaaatggttcctccttcagtcttccaaggggtaccagccgcaagagcaaattcgtatggacatgaaactgaccccaaagaacgtcgaatcaaacatcaagtggccggtatgatgtactagtacacggcgcggcgccgtggggtcgaagagagagagggggatcgagccgatttatttgaaagtgggttggtatattgccttgtaaaatagtctattattttacttcacaaaagccaaatatgtctgctcttgtggcgcagttggtagcgcgtatgcttaacaagccttaacttgtaaagcgcataaggtcctgagttcaagcctcagcgggagtattactttttgacccgttcaatgctttttcttacgcgcgtcctcgtttcgccgcgagtcccaataccgaattcgctcagtctttgatagtactcccattctgaagatctttgatttggcccagcagccgattcgcaacgagcggtctcaaaagtcccagtttactacgcaatttgtcgacgcgtgattcgacgggaaagaatggtacgaaccagcgtgcagcatcagatcgagaccggtctttcgatgcaagagtcgatcaagcttgatacatcgggaatttatcttttgtgacgcctgtacaaacgattgcatttgtaccttagtgaataggaaacgattgagcggcctctcggtgcttgcaagggcgaaatagcaggtggccagtgaatgtgaatcaagagacaagtccggagaaaaagttaaagttgtaattacccttctgcagttcgggacgatccaggcaggattagacacgctcaaccattcgtccaagtcgatacgacttacccagcacgaattggcaaccgggctacttcctgagccagatacctgtcttgatccgctcgacatggaaaagacctgttcgcccacgcccatgtcgaattgcatcatgttgactccaggtccgatgctcttagtgacttgctccttgtcgccgctcttgacggagacagatcctccgcctgtgctgaaactagcgacgaacacactgtcaccgacgatgtcccagccggcgggtcttgccccgcaaatgtcggtgccatcacagctagaaacacttttcaggtgaggacggtaccagtagaccagcatgtctcggtcgacgacgggtcttcgggagccggtcttaaacgcggtgatataaggtcgagcaaattcaagtagagcgtcatgagatagtccgttggtccaggccccagacccatcatcgctgtgtccattgtccgaaggaccgacatagtgagactcgccataatcgttccaggtgatgatctccaggtatcgaaggttcggagatcgggcggcgagatcaagaatctgctcccacctctcgtaccagagcgtctcggacttgaacagccaattcttactgtaagacacttccttgccaaagtgtgtaaagactgccaccatgcatcggtcatgtcagtgacaagcattgccgactagaaatatctgtcgacttacaccagggggaaacaggagccatgtaagcctttccctgtgagctgagctgaccgagatactcctggtctttgtccgtcgacatcgtgctgtcgatcggtgcgttgttggcgctcggccaggcgtaccagctgaaaagcccatcgactccaccgtttccggcattgccagcggagggttgccagttgggcacgatgtaaagaggggtcgaggggaaagccgaccggacagcagaccagtcgaatccgtccccggcgaacgtcgagacgaaggcggcattcgatccggcgacccgatgttgtgcgggaagtccgatgagcggcttcataatgtcgattacggcggcagtgtcggaagtggagaaccagttgaactacagccggcacgagcccgaactatcagcgtcccatcttcaatcacgctagatcatatttaacactcacgtcaaagctgacgaacacctcaaaaccgacccgcgccgcagcatcataagccatcctcagctgactttccgtgtaactgtctttgccgacgttcaacgcaaagccatcgatgccataggatttcgccatgttcatgtcgcgttcccaattcgaaggaccgtagctcgcgacgataccgaccataaagtgggcaaagaccattcggggtaaagaagctggatcgcggttccccgtgggaggggcaggtatagaggacgtagagctggattcgcctgttgtggagggcgatgccgaagtcgtaacgaatgtggtagtagcagttgtggcggagctcggtttccttgtagaggacctgtcgtcatcgtcatcatcttcgtcttcgtcttcgtcgtcgtcctttttctcgtcgtcgtcattgtcatcatcgtcgtcgtcgccaccgagatctttcaagaaatcgcgtaacttgtcggtctccgatccgtcgctctgtcgtttgtaaacaccttatgtcgagttgatccaaccattctggatgagcatggctcgaatcggtttgagatattcattatgggagcttactggtttcggacctcttgacgcttcggacgtgcttctgcccttcaaccttgacatcgcgagatggaccgttccggacgggtaccgcgttgatggccgtggcgaggcagagcaaggaacagtagatggaggcggccgagatcctcatgacgggttggaagactactggggtaggactgagagagagagattgaccctgggtgttggatcaaggagaggttggggttgcgagggaaacgagaagaggtaagaggaatcgagaagggagggggacggggtttattgaggggactgaggggattcaagaagttgacgagtacgaacttgtgattgagtaagacaataagacggccacggcaaaggaatacaactcactctgaaacgggctgacctatataggtatcgattggacgatccgcacagacgatcgcggtcgagccattcgttgtcgattgaatcatcctccttccggtgaatgacgacgacgcgggcgtcattatcgattgcgtctgctgacagtactcggtagctttcattggcttatctggtccgtatcgcaatgatgctccctgttccctagtccgtatcgcaatatttcgacgcggacaatagaaatgaattgcacaaaagaagatttcatctcgtctgacccggcaactcggaacaaaaggaagaaactttgcggtggaaggggagtaattttatgaaacgcgtactcatcatctgatcaagggtggccccttcctttgatccctttgatccgccctgcgctctccccgccttgggtaccccttgatgggagatccttccgccgatgaaacacaccgcgtccgcacacgcgtctcgcgtgccgccggtgaggctggtttgtaagtcgtcgtcctttgatcgtccggtcgatccgtgcacgacaaccgtgcacgggaaggtacttcctcctgtgctgctgtaacttggacagctgtctcggatcttgtatcggctagtcacccgctccatgctcagtgtgacgttcaagttccgtcctggaggatgactcgcacattgaccggaactcggcctcaaggtacgatgtctaatcagctttacttgatttcctgcacaatggacggtcatcgcgttccccggctcaacgatcacggatgacaagccgtggtgttcaaagggcatgatatcgaagacctatcgttaaattacaagagccaagtcccgattgaaagggtcgtcaatgtacaatgatcgatacaacacgtcgacaaggagatagaatcgtaaagcgtaaaaagaaaggggagggaagagatacccaatagtcccgaggtgacgggagctacgggtccagagctagagcttatatcgccaggaccggatccttccccccatgggaactccaggaaaccaagccggggatcatacccgttcgttggccaagctggctacggttatacccgcccggataaccttggcgattgtcgacaagaggtctgttcgtcggacgggtttcgagacaaagtcgtcctacaccacggacaagcagggaaaggtaatcagtcggaagctccttgtaaggaatcgcaccggaccccctcaactcaccattccggctgccaaacatcgttctttgtcgcccagcatggcgtgtgccgtgagagcgatgatcgggacccgtttgtacccctcctgatcctctagattgcgaatcatgctcgtcgactcgaggcccccgacgacaggcatcgagacgtccatgaggatgacggcgtacggctttttcgccaacatggcatcacgatacttttcaaacgcgacctgtccattgtccgccacatccacacggtgtccacctccctcgagcagcttgacggcgagcttttgattgacaaagttatcttccgccagcaagatgtcaagcgagttgttcttgcccggatcggtcggttgcagctgatggctttccagtgcgggcaaaagggcgctcgatagatcggacatgttgagaggggtagtaaagtaggacgtgattcccatatcgaggcatgtcttgacggggacgggcgacaggatctcgtcctcctcgttcggaagggcaagcaaacgtcgcctcgactctgacaaatgcaggtaccgggggttgtccgggccaggaggcacgttggtcggcgaaagcaagacgatcggcatgaatcgcagatgttcgacctctctgagcttttcagcggtcatcaacgtgtccacaatgacagcatggaaggctggcgccttgtcgcctgagatggccggttcccagaccccttgcacagagttgacgacgaccggctgaagattgagctccttgagcgtctcacgtacgcgtgacgtatcgcccagcgtgtcaatgaatagcacgtgccgtttcgcccagggtgcgagtcgatccaagacttgcaacgtcgtcctgaccgtcttcttcgccagcatcgtaaagtagaatcgacttcccttgccgtacacgctctgcacccacaatttccctcccatcaggctgaccaatcgtttcgaaattgagagcccaagaccggttcctccgtactttctcgtcgtcgatccgtctgcctgagcaaacgtatcaaagatcaggtcgagtttgtcttgcttgatgccaataccggtatcggcgacgcaaaattccagctcgacagcgtcctcgtaatctttgacgcagcgacagctcagcgcgacctgacccttggtggtgaacttgaccgcatttccgatgagattggtgatgatttgacgcaaacgaagcgtgtcaccgatgatgtgatccggaatcatcgggtcaacattgaaaatcaggtcgaggctattctgagcggccttgacgcatagcgtcttgagcaccccaaagagcgtggttcgcaatgagaaggggatctcctccatcgtcattcgcccggcttcgactgcgatggccagactcgtacgtcagaacaagtgcgaatacacgggcatctgtctgtcttactcttggagatatccagaatatcatcaatgatggtcagcaaagatccagccaattgcgaaacgatcatcaggttctctctgcgagcaaggccgagttagacggccgcttccatagtctagacagctgtcgaatactcacctctgctgcctggtcaactcggtttccagcgtcaacacggtcattccaatgattccattcatgggcgtcctgatctcgtgtgacatgtttgccaagaattcactcttggacctattggcgagctcggcagcctgtctcgcctgagtgttcttcgagatggattctcgcaaagtgtataccatctggttgatcttggttttgagcgaatccatctctccgcttgcttcgacggtaatgaacttggtaaagtccccatcggtagccgcggctgagatttgagcaaatgctcgtacttgactggtcaggttggccgccatagcgttgacatttgtactgccgagccgcatattagtcagtgcgaagagagccgccgagtagagcaagacttacgtgatctccctccagaccccctccacgtcctgaacctgggcttgaataccgagcttgccctcgagacctacttgttgagcaacccggactacttccgaagagaatgaccgaagggaatccaccatgccattgacgtcgatcttcagaagctgaatttctccgtgcactacgacatcgatcctgttgaacgagatgaagtcatgagcttgatatcttgacattgtgagcaagggcattatccccgactgacttttgcgaaagatcgccacgagcgatggctcttgtcacggtcgcgataccccttacttgagtagtcaagttccctgccatcaagttgacattgtcgaggagatccttccattccccaagagcgtcagggacaacggcctggcctccgagacgaccctcggtaccgacagcaatggcgactttggtcacctctgccgtaaagattcgaagttgcgagaccttgagattcgagtgagagtcagccaaatcatttcgccaacgctcaagaccagatctgacataccatcccattgacggtctgtttcaagctcaggatttcaccggcgcttcgttgagtggttagcagctttgtcaagtcacctgctgccaccgcactggtcacctgagcaatttctcgcactctgtgcgatagaggtggtactgtcaggcggcttgatagataccctcggattccacgctctacttactgctcggtcaagttttgcgccattctagaattatgaatgcctttagtcgctgatacatcacactctgtcaaaaggcgcaactcactggttgacgtttgtcgtcagctccaaccagactccaccgaccccttcgacctgggcagaaccgccgaggattcccttagtccccacctccagagcgaccctcgagacttctctagcgaacactgtcaactgtgccaccatgttgttgacctgcagcatcaaactcgtagttcagtaggcagcacctaagcgaagcctcgacggtacctctcaccgtatccttgagaatcgcgatctcccctgcagcctcgatctcgactttttgcgacaagtctccattggcaatggctgtagcgacgtaaccgatacttcgcacctgatccgttagggacgagcacattcctgcgagaatgtcatcggtttcaatcttggctgtaagcaggacaaagttcggggtcgttactcacgattgacgttcagcaccaattcgctccacactccttgtacatctgggacatttgccgtccgtcccaatttcccttgacttccgacctcgagactgacgatactaacttcgtcggcgagatttctcaacatcttgaccatgtcgttgatggtcagcttgagttccagcatttcgccctgagccgggacctcgatcgtgcgggacaagtctcccttggagatggcggttgtgacttcgctgatggccctgacctgttgtgtaaggttggcggcgaggttgttgaccacgaacgtgagatctcgccatgttccctggacaccctcgacgatggcctgtcctccgagtcgaccttccgttccgactgtcgaagcatttctttatcagccatgttcgtcaagcaaccatccccgggctaaacgagcggactcaccctcggtagcgaccctttcgacttctcccgcgaaactcttcaattggtccaccatcccgttgatgacctctttcaactcgctcatgatcggtccttccactgggaccgtaatcttgtgctccaaattacccatggcgacggccctgcacaccctggcgatatcccgtacttgcgcacgaaggagttccagctccttttcgggcgagagaggcaagtctcggcctgggtctgacgaaggtgtagtcgaggatgatttcgtcactagcgtttgtgagaccggtccgttcggacttgatccgttgatagctccacaaccttgacatttccgaacatctgcaggcgtctccccatgctgcttgttaacgacattggcgtcctcagacaaacctcgctcgacgttcttgacgccttctggcaaaggcggtgtttcgtccggggtcaacaacgaatttgcggcaaaggccgtcatcatccccgtcccgtttccaggtgcctgtagccctcctgtcgagctctgaatgaccgcctgtgcagccttcagctctgccctgagccgagcgttctccttttccttgatccagagctggttgaggacgtccaccgtggccacctcgatctcggcctgtccgcttgatttccctcttccagggtagaacgggaagacccccatctcgtaatcgatctcgtccaacgcatacgagacttttctcgactcgtcctcgtcctcgtcggtcgtatccactacatggtgcgtcggcactcgggaagctatcgacccgctgttcgccatcgaggggatgacgagatcaactgctctccgttcggaactctttagcaggctcaagaggtgcctgtcgaaccctgtcatctcagctgacgtggctattcgatctacctcgcggtcgttggagaggggagtcgagctcgatgctgacgtcgttaatgacggagcagacagcatcgcgtccagagggccttgccgtgtaaagtaaggtcggctggatcgagtaggagctgttcgtccgcgctcaatgatgggaaggaatagtggccctgatggcgtgtaggaagtagttgtgggacgaagatcgggtcaaggacaaggtaggaagttgatgtggtgcccagttatagcgaagaagaacggaaagaggtccccaaaggaggtctatgcgctgcctattctcgatgaatggtggagtgatggtctcgtcctctcacgatccggcgatgctttcacccggagggggtcctttgatcgatcacaaatcacgtcgagctcttcctatggatccagaggggacaaacaaggttcccgagcttgtcgcttgatgcggtcgttatgctttgctccgtcgcgggtcgtcgtgacgaaacacggactcctgaaagaaccttctgatggtcgggtttggtttcgtatcacccaaaatgccagaagccagaagctagaagcaaagaccgagacctcggatatggctgtcgttgtcgctatgcccgtcgcatcggtcgtcgcaacgaggttgggtaatgcggcaggtgttgtgcgagaatacgagatgggtgtgggtgtcacgcacgctaaaggcgattgagggagaatgatagatacgtgatcgtcccgccaagaacaaaagagttcacccgagcgagagtacagaaagcagggagatgtcgatttgagcagactgacgagtttgggagctcaggagatgagacgagatggacaatcaaagcttgaacagcaagaggccgagaagcgagaaggccagagtgataacccgttggagctagctacaactcggagtcgtagctgtcggctgtgaaagagtgtcgatcccagcaccagcagccagtagcgcgtggaacccaagggttctcgtcggtgtggacatagcaaccgtacacggcgcgcatgccatatggcatcgcgttgttgcgatcagcacgagacacccggagaaagcagcctgcagcctgtagctggctcctcccgccctttcttgcctgttatcacggcagtcccccgggtgttccaccgtacctggcacaaactctcgcgagaaaaccttcccggcgacttctagcttctagctggctctctcaggttagaagaagagctccaaaacggaacgcccggtggatcccgcctttacagccctccaagtctttgccaggcgtgcgcaaacgtgcatgtgggtatcgcgttgttcagcctgtccctcgatcgtccttgtctttctgcggaatagtggctgccgttcgcacgatgccgactgctactattgctctactactgcgctggagcgcgcgagagaacagagtcagtcaccccagattcccatcaccatcgaatcaacacactaaatacttccgtcacccgtcaccccggcccgctgtcggtctcccgcggtacacactctctgatcactgaagggtctcgacaaacaaaacaaacagacgcgttcgtccatgtttgacagaagggttgtatgagtacaagaggaaaagcagcttgccaaccggcaagacggtgaacaccaccacttcgactcctgtgagccttttccgcgctcgatctccatggccgaaaccttgaactcttattttggttcccccactcccgacgttccgaacgatcaaaactccgtccgttcgcgcatctccgggcgcttctcggcgattcgccctatttcggcgcgtggcgtgagtggcgtgatggctctgtgggctctggaaagaccggctcgggcatcggaacaaagggttcggggaattggtaggtcgagggcgagtgtggtgtcgacggtctcctcgaaagacgcacacacaagtacgagtctgcgcgtctgcgagtgcgtaggtctggcaagtattctcccaagccagtcaaccgatgccgtcctatcgcgcgatgtagggtacatggtgtcgtacaacagaaattcaaccgacgtacaatctcaactcaattgtctaccttttccccgcaatatacgttgggatgacattaatgcagtcggtgtcacaattcatcgcttcagtcgagttgcactacagttccatgcatgtaatttgccgactgaccatgaagagatggatttgtaaaccgggctgttcataactaggaagctcagcaataccagatttcgcttgttccttcttgggtgatgccctgcggggatccgtaatccatataatggcctcatttagcatagcgtcaaggttgaccgtgaaatacctggatgacttgggtgttcggacatgtcaaacccgaggctatagttgtcggctacgactgcagcaggagccgtcgttcgggcaggctcacagcgacgtcccatgaaagacccatcgaactgcagacgatgtacacattgcgccatggtatattgtggtagagatacagttgtagtacttcggttgatgaccatcatcttcgagatgctacgtgatgggatttgatcattcgttcggctcagacttgatgggcccttcgctcctcgttcctcgtccttttcctgctgtacccttcttcgcccgtggaggagaaactgcggccgaagaccttgtcgcctttcgtcgactcgccggtttgatgtcttccttttcctcctcctctgattcgacaggttcctgcttgatagaccggagaggttccggctctggttcggtctctggtctctgctttctcaccggcgtctcttcctcgtgtttccttgacagccggtccgccgctgcgcgagagggcttactcgctacctttccctgctctatcttttcctcgacctcgaccttgacctccttgttggtcgcagtaggcttcttaccctcgacctcgaccctccatcgctccttttcttgctcgtacttgggatccgcttccaacctcttccacacttccttgaagacctttgccccgcggtacttttcctcgtccgcgatttcaccagtccgagggatctcgagaccggtcgaggcggaatatttgcggccggccggacggagtgcgtaccgcgtcgatcgggtgtagcccatttgcaggaatttgcgggttatgtccatgctgtatatcattgcgcagacaaggttggtaattcgacgggatccgacagggaaatgggaggcactcaccctacaaagtcatcctcggccctacaaaaagttccaagcagacacaaatcagctcattaatttctcaccttcgcactacttactaaacgggaacctaccggtatccctcgaacctcttccaaagcgcctccgagctcttccttgcggcagcttcgtccttgaacctccacaagagcttcagttcggccgagtacgggttcgtcttgaacacgttcatctctccacgtaggatccggtaggcggtagggtccgacttgtagtcgatagagagggggtctgactgcgcgggggctgcagagggtttcttccgcttggatggcggtgagtcggagccggatgcggatcgtttaggcatggtgagtgagttgtggaagaggtacaggcgagtttgtcgagtgttcatgcctgaagccattctcgcatgcaagtcggaattggttgtcgactaacaatccaataagtgaaatcccggatcactaactggtcgagttcgctcgagacccttgccagatctttcgtcatcagtttccgcaagatctcgatcgatttacttccgagaatcacgaaaatagcttccggggactgttcaattcacttccgtctcttagtttcctcgatgacgacccgcgatatgatggcgagtttgacgttgacgatgtgagtacaatagctatgagactattatcgataggtagcttggctcattcagatctatcaagccggctgtagttgtccctacaaacgaacgaacaaacaatcatctccgaacacgatggccagagcagcaccgaccacacgatccgctccaccgacgcgatcgtcaaagcggagaaagaccgatacagaggtcaaggaggaagtgcaatcgggatcgaacgatgtcaaggcggagagcaaagctgagcaaggcggatcggagggagcggtagcggaggagatggtggatgtcaagcccaaaatggaggatgttgagcctactgtcaagggggaggttgcgcaaggcaatgggaatgagcccgaatcgcaggccaaggaggacaagcctacccggcaatcaaaacggtcgaccaaaatcgaggtcgaggataagatcaaacagttggacaaagatatcggcgagctgacggaaaaggttccgaccgggtcgacagccaaggcggcctcgaagaacaagtacaatctcaccccgggacagactcccttcccggactatccccaccctaccccggaagaatgccagaacgtcatcgacctcttgtcgacggtacacgaaaaacccgaacgcgcgatgcagacctcggtcactgtagccgggtgtggcgaggtccccgccgtgctcgattcgctgatgcgaaccatgttgagcgcggcgacgacatcgtccaattcgtcccgcgcgttccagaacattgtttcccagtacggtctcttgacgaaggggatcggcaagggcagtgtcgactgggacaaggtcagagtgggcactcaacaagagctcttcctcgccatccagtgcgggggtctcgcccagaacaagagcaaaaacatcaaggccgtactcgatatggtccacgtcgaaaatcaagaacgccgggacgccatcctcgctgccaagaaggaggagagcgagctgccagcgggggtcaaggacgaatccgaaaaggaaaaatcggacgaggtccaggcggccgaggagaatgtcctctccctcgactacctccacgcgctctccacggacgaggcgatgagcaaactcacctcgtatcccggcgttggcgtaaagacagcttcatgcgtcctgttgttcaatttcggcaggggcagtttcgccgtggacacacacgtatggaggttgtgcaggtggttgggctgggtgccgaaccatgcgacgaggaaccagacgtattctcactgcgatgtcaggatccccgacgatatgaagtacgacctgcacgcattgttttggaagcacggaaaatattggtaagtcgagatcggttcgtactcacccatgtcgttcatgtgctcacaagggctgccctgcacacaattagcccgaaatgccgaatgatccccgtcacagacagaccgcagatggaaaagatggtttgccccatcaacgacctgatcaaggcgaatggcggaaggaaacaaccggaagaggccaagcggacgaagaaatccgccgccaaaccaagggctaccaagaattcttctgctgggcgcggcaaaaagagaaaggcagagtctagtgaggaagaggacgagtccgcgctgagcgacttgagtgacgagtccgattagccaacggggcttatggtgcagacggtctcacagacgcaagaattcagttgtattcaagtcatataatcggggcctcgagccagcatgcgaacgcatcacatcagatatggtatgggtcatcgtcaagagcagaaagatctggttacaggggggctgaaacaagcagtacggtattataaagcggtcggcgtgttggataaggcagaaaatggaatgcttctacatggcaacgtgacgacccgatcgacgtctcggcgtaaccttgaattgcggcgtattgacggcaccgggtccgaggtccttacggatcgctcggacagtctccgggacgctcatcctcgccttggacgccctggcggccttgatgacgggtgccatatagggtttgtcccggacttccaagacttcggtaaggcaagcgacttggttggcctggagaaagaaaatagcgccgtgagcgggtgagccatgcagaggcatccaattcatcctcaccttttgctccatcgtgtcaatgacctccttgagatgctcggccaagacgttgcgcttggtcgacaagggactcatgcggcggtattgttcagcgaggtcggtatagatgctgcgacaatgtcgagtgagcacgcgcgcgtcatttgacagaacccgttgcaaaatgtctcacctgagataatgcttgtaatcgtcttccaactcgcgcaataccttcatcacgttggtctggggtggtaccctaccgccatcgagctcgtgttcgatttcctgggtgacgcgcttggcagtgtccttgctgggtcgataggacgatgaggccgtcttgaccggggggactacctgaacaatttcctctcctccatatccctcgtccacgtcgtccgcatcctcgacgcgggcagccaagtcctttgtttgcctggctttgacctggacttttgccattttcggcccgggagaaaagaactctcgttccagcttgtcgccgcgaatggctgggaagggtgacgatgccggatcttcttgcggctcgttggacctggaatggtgtacgctccgtcgaccggaccggtgcccctcgccatcgtcgtcagcattacgctgaaccgatagggagcgtgagtcgccgtaaacacgagatcgaggggtgggtgacgaatcgccatcatcttgagcggctccagccatcatcgtctttcgagatttcgacccttcttccgtcctgatgggcgcggttcgaggagggtccgtactatccgaacggacatcgtaataggcggcggtctgcacgccgtcggcatattgcgatttgcgacctggctcggtatgcgcacggctaggaggacgctgcggggtgaatcggtcgtgagccacgcactgactgtggtgatcaaagcattcgagggtacgaacctgtgcgtcttgatcgctcgtttgcttgttcttgaggggcaagttgatctcgcccacagtcctctcgtaagccccctcgacgacatccttgagccgagcgacttccgcctcgaggccatcgacctttcttgtaaggtggttgacgagagggagcagatcgcccatctcgaccgtctgaacctcggtggccttgttccgcacgggtcgggctggggtacgtttctgaacctcttgttggatcatgtgaacccgtcccatctccttgtccaagttggcttcgaggcggaagacgtcgtccttcaacgcttccaccagggtctcaagagctgcgaacgagagagggttgacgactcagcacagggcaccctgtctgaacgaccacgtggtcggctcgcgatactgacccgtcttttcgtcctccagcctagctacctcaacctgcaactcgaccttctcgcccttgtatttttccgcatcacgttgagccttggaagcggcgatcctggcgcgctctaattcgagctccaattccctgattctcgatcgggacgactcggtctcctgcctcatggcctgcatgtcggattccatctttctcaacgctccatcaatattggctgttgggttgtaggaacacaacaagctcgtcagtgctgatcgaacgtatacgcacggatcagaagggctgtaaggagggatcgttcaggctcacctccagactgtcttcgctctccgtcatcggccactcgacggtgcaagagccccttggcaggggtagccaacatgcccgtcaagcccgtcaaatcccccgtcccattcccaacgttcaccttgttaccgctcgagacgctcctctccggtcgagcatgccccagctgcgtactcgaggcggagacgatccggactttcgggctgatgatgctgtccaccagatcgaacgagccctttgttccagtggaagtcctacgttgttgagcctgttgagcactgagtggtggggatggtcgtgcattgtcgaacccgtcaataacgcccatgaccttgcgtgcttgtccttgtccctgagaagcccgtcgatcgccctgatgttgcttcttgacctcgttctgctcagtacttatggcgccggatgaaacctttctcgtctcgtgctgcgagatcgacctggatcctgccgtcgaggtcaagggagagttggcttgtgcccttagaggagacggctggacgggtcgatggaggtgtcgctgggaaggattaggaatgaccccagcgttaggtccaaagatggacctctggctggtaacctgttggtagctacaggcaacaagaacgacggacgggaacgcaacgagatcagtgcctttcgtctcgagaccatgcgaggaagaacccccgggaccggatgacatgaccgacttttcatggtgttgaaacacgttcttctcacgctcggaaggctggacgatcttggcggccgcgatcaacccttcgatccctcgttcgggatcatactcgccgtcctcgtccgcatcatcgagcccgtgcccatgcccgtacccgcccttgttggcaaagattcccgctccaaaggtcacagcggaagcgtggtgaccgagggtggagaccggagagcctccgacaaagagggaccgctcgaaatcgtccaggttgatctgatcacgggaaaaggatatatgttgttgttgtgccggagcggtccgaccgaattcgatcgagttggtggacacagacgatgaagactcggtagagctggaaggaagctggtctcgtgctccctgtacgagatgatcttggtggtggcggtgctgttgttgatgatcacctcggaaaggggttggtggttgccaggtcagacctgatcgacgagcatgagcgtcaaaactcgattcggtccctctggaaatgttcatcccatcgtcgctatcggtatcgaccaaccccatctgtctttccaagagagacctcgattggatggtagatcgagtgtccttgccgaaccctccgagtcggctaaaggtatggttgctatcgaactcgtcgtccgtcagaccgcccagatccctgtcgaggtcggattctacctgccgacgatccgccgcgtatttggaggccgggatgggggatggcatgggcaaggaaacgtcctcgtcgtcttgattcatcatcctggacattggcttggatggttcttgcgtgtattgtcgttgtcttgatgggcccggtgtcgcttgtttttgcaagaaagggttgtcgtggtcgtcgtgtctcgagagctgaatgaggtccctcatctctggcatgtgcgggttctcggacctggatgatgtgtcgtcgtatagaaagaggcaggagaggcgagtggtttaatgccgggacgagttgagagtcatggaggggaaggggagagatggtttgatatcgatcttatgatgatgagtagatgttcaactcgaggttgtttgtttgtttgttgttgtcattcgaggttgaaacgagaaaatcacgtgattcaacaacgacaagaggcaaacaccatactactctgtatcatggtgggtatattgctatatagacacacggaccctctcacttggtcacacgcttcaatgccaacctatccaaagcatccccagcctccctgaccccttgcctgaatcctaccgccttggcgtgcccttgactctgcttgacatatttgatcgcgccagggacatccttttccatctagagtccaggcgaaaaagtaaacatgtgattgcgtcagctctttggtgcgatcatgaccgtcatgacatcagccgattgcggatgactcgcctccaacaaggctcccaagttgaactcggccactatcctcgctcgttcgcacacgctcttgctattcgcactggctccggccccatcctcttccagcgctcgatcggcgagttggagcgacctcagagaccacgctttcgaagccgtaatgttttgcgtcgtgggcgggttcaagagcgaggacgacaaggtgttgatgagctacgaacagatcaggatgcgggcgtcagcttgagattccctccgggttcgcaacgtttgggcaagcgtatcctcaccatggcggctatagagatcgtacaagatcagcatcgttcacgatcagcgctgtgaaagtctgcttgtcactcaaagctctggttccgactcaccttgacaccggtccgctacgctcaccgccgactttttctcgggcgtatccggcggtaacagcgtgctcacagcctgcacatagagagggttcgcccgtctagatcgtccgcgaaaccggcatgtcagtcgccatcacgaccaaacctcatatcgaccgagagacgagcacaggggccaaaaaaggggaccgtccgccactcactcaaacttgccttgcctcgcgtaaaggtcggccaggctctccatggtcaatcccatactcttcctcgtgaccttggcgatcgactctccactgatctccctatcccccttgtcctcgtccgtcgaaccttgttgctcgtcaggaaagacgaaatccctgccgacgaccttggtaccgtccgagttcccccccgtggcggctaccccattcccactcccactctcacttacacggggcgcacctagctggatcatcccctccagagcccggatgaggtacttttcagccaaggcttcccactccttgtccaccccgatcctgttcgcccctggcgtgtactgcctcgtcacctgtccaggctcactagcgagcagtgccaaggaccccatcttttgggcgatcgctacccttctcgatcgatccttctgggacagactgatggcatccgtctccgtctcgtcgatcaggcccaatccggtttggagcgtccggaaggcttttcgaggttgaccggcggattcgtgcatcgccgcgagggttatgtagagaccggtcagtttcaggagaggatccacgccgagttcagcacggggaagcgctcgagccttgtcgatcgcactgaacgatggcgtggtcgtagtaggatcgtacgtgcaagatgctacatgagtacacagagagagagagagagagagagagagagggcgatgagaggtgtgagggcggcttgacgtacctctgaaagagcttctcgctacctccaatatcccccctattcctcgccttgatcgccctcttcaaatcgtcccggacctcgggcggccaggtactgaaagcgaaataccactccaatcttataatccccgtgtcagtgcgctcggatcttggcacagatgtggaaatctcgcccgactcacaagccgtaggtcgtcacgaacattcccatcaaggccaacgccccgaacaggtgagatatccgaagccctctcggtcggtcctggttgtcgaccccgcctaaagcaggtccactgtagcatctcctctgtggtaagcgaatctgggacgacgacaaggctggcttgtattggtgggtagccctgagggctgaagggcgacaagccgatgtcgccgctcgaggaagagcttgggcgagtcgaggtgtctgcatggttggttgatgtctccgatttgcctcgatggaagatgggtaacttgagagatgctattatcaactgaacaaggttctcctgcgtgcgttctatgctctagacgttcagattaccagaatcacttctaggtctaaccatgtcgaccgacattacaaaaccaaaactcgccgatctcgcgccttgtcctcgtcgctcaaaagaagggaaaaaggtgacgcaagacaatttcgcacaacacttgacatggcgagactttgaaacacaatcaattgtgattgactatctcgtatcaggtaagcgcttctagagctctgtgaatgaccttggtacgtggtcctggtcgccgatgacctcaccagctaccgatattcgccgaaggaacgaggacttgcgagccacggacgcacctggcactcacgtcatagcgcccgtgtaccactttcagatgtgaacatggtatatgctcgaccaccaccttgtccaaatacaaaccccggcccgaaactttcctcaaccaaacctcgcgagagcacccgtctcgaccttgatctctcccgaagcgatcttcttctccctctccaacttggccctctggttctgaaccttttccttggcggcgacctgccgacaacccgaaatccgtatgagccaccgaagagctccaaggatcgcattcacacagcacaggacgatccactcacgagcgccggatcgaccacgttctttctctttttccgcaaaaatttcttgactcccttgtctcgaccgcgcatcttgtgcttgagcttttcgaccttcaacttttgcccgacctgaaccccaccctcgtcttcgtcgctccctacttgatcctcctgctcggccttgatggccgcgtcgatctcttcccccgacttgcccaacagcctcaaccgttccaccctcgatttcttgtaaaacggcgtctccttttcgctgtacgcctctttcttcgggtcggccatccttcccaggaaatcggcgtccatggtgatgaggtcgggcttgatcttttccagcacgccccggacttcacgttccctcctcctcgtcttgctctcgtacacgtcggcctcgttcgagtcgaactgggcgagaccggatccggggacgagtagcgaggagaacccggcatcgtgcccgaccccgaggatatcttcaaagggtacgaatctgactcctctgggtgtccggctggggagcgtcaacttttgatacaacctgggaggggagaccttgccttcgaccgagggcgagtgacagtcccggtagacgttgacgtagcccttgttgctgacggcgagcatccccttcatactccaatccacttcgcgttgcccgtgaccgcgctcgttccattccctgacggtctgtccccagtttcgacaatcccagatcttgacactaccgtccgctcccgaggtggacatgtatcgtccacaggaggacgatgacgggtcgaccgagaccgattggacgggacccatatgggcgagcagtttgacgtggggagtcgacatgctaggcgaccacaacgtcacttgacctgcagatacgttacaacactcgatctgatcagcctccggggtcgagacgatcgtttcttttcgatcgacggatgacgacgggacgtaccgttttggtgtccgagttggacaatcgcgttgtgtcggttctgcgccatcgcctggacactccccatcctactcttgtgctctgcgaccatcgttcccgtcgacgtgtcgtgatacctcaggatcccttgattgccctacgaccccgcgagaacgtggggggaatcagcgattaattcggatgggctacgaggggacgacgagaacgactcacgatggtcgccaagaggtaatggtatggcaagaactccatcctcgtcacatccaagtgctgcttcatcttgctgtaaatccgccaaagaccaagaaacgatcaactagctgattcttcgatcgcgattgatcggcttgaggcttgaagaaagtgatcggtcatacgcactgtacttctgttccaaattgatcatagataaagacgtatttcttctgcgcgactgcgtaaaacgcctctgagtgcaaaaacctacagacaaacaagggccgaccgagtcaatcagtccgggtctctttttggtttagtctcgacggcaaaatagggatgcgaggcagataggagggtaaggggactgcggcacatacttgatatctcgtacggtctccccgagttggatctcggagtgaagtcgaccggcctgccagtcaaaggtggcgacgtgcccatggctgccggctatagctagatgtctgtcatcgtacaacgagacgagataggacgagggggcgacgtctcaacgtgtaagctgatgcactcgaaatgataccaagactcaaacaccagactgaccgtccgttccgagtgtaatctatccggtatccacctccaccgacggtctccaacttcaagtcgaactttttccctgcgctgcccgcaccgacggcctcgacgatctcatcctgaccgactctccaagttcgttccccagcttcgaggtcgacctcgatcccgccatcttccccggtattgttcaggtactcttgtacctgatccctctcgatattgcttcgtttctgtgcgacttgctggctagccaatttcgcacgcagtttcttatcgccaatcttgttcaggtggatggaaggtttaacatcctggtgcgtgctctggagggaggaagagagccgggtggtaggcaagatggaatgcaacgaggggtcgatggcgggtttggatttccctcggttgacggtctgatgagggaggggtttgcgaaacttgggtttcgaagtcgatgacgaggcctcgataggaccggcagatgctagtagcgagtccatgctgggggatttgctacgacgctagacagttgatgtagttctagatttaaaaggtcaaaggatcagaggatacgagatgtgcagatggtcttctctatttgacatttgatcatgtccagggttgaacttcccgaaatctcaaagtggtgaacggacattcaagtgtttttacttccggtgactcctgaatttacatccgacaccatccggaatcaaattatcaattccctttgatgtccgctcgatcgcgatctcgggcatctcgttactcatactcgactctcgactcgagcatcaccttgtaagcttgtaagtaagttgtaaaaagctgaccacatcctccgtcacgttgaagcacatcataattgcggttctttgaaatcgaacgaatccatgaggatcctcacatagccctgcctgctctcaaatcaccgtgtctcgcacgagacaacgaacctcgacatgacgacgaccacctccacttctgccatcccgggcacgacccctcggccgatatacgaagatcatccggccactaaaccgttgatggagtttctgcaagacgggaagagcgataacttctttcaaaagctgtatgagagcgaggctgtctgtttggggttgtttcggtgagctcggtgatcaggacccggcttggtgtcgagataggggttcgtccggctgagagcacatctgtcgacgttttgatgtgattccaggttattgccctcgctatcaagacagatcatcatgaacctcttgtggctttcaagcgagatgaaagcgactcaattgaagttgttcctcgggttggatcctaaagcatctcccgacctgtgagtcgcacctccgcattgcccatatccccaacatttgacgaggaggacgctcatcgtattcccccgaaacgctacgatcactgtcaatcgttcatgcaccaacgaccgggattccagagtaacatctcagaatcctctgctgcacgacctcctcatactgcagactatcaggcataaaggcctcatttactacgtcctccacgaatccttcaaaaagggccttcgaggcgccttgaccggcgggtgagtccggaccacggaaataagatcatcattgctcccccaatgagacggaacagctaaacgctcgatttccgggcgggatagagggtcgaatcaggcgttcggggtgacttatcggccgaaagcgggtgcgtcggatgggtccatcggggtagaggtggagcagctcgaggcgtacggggatggttcctgggaggtgagtctcttccctcgtatattctgatcgtcgccggggcgagaaggagagcacgcctgatatttttcctctccggcgtaggctttgttgaagtacatggtgtcttcacaaaaacgagcggcgagagaggacgagaccccggagaagcgggtactggacctgttactcaattgcggcttgatggaacgagtgtgagtttcctcgccccgctgtcccaaatccagcaccttgtgctgaagtcggaacgaacacaggtacgacgatcatcactacctcacggacctcttgaagatcacttcaaaagggttccagttcttactagaagaccgatcggcacagatctggcagatcttgatgtactacatcgagcaggggatggtacgtccttgccgctcccccaatcaaagccggccggtctgctgaactttgcccggcgtgatctttgcagacggaagaaggcggggcagggttggacggagtcgaggtgttaaagctgctcttctcgctgagtaatatgcagctagggcgggtgagttcggtcgctatcaaacaagacggtagcagtcggctgagagcggaagtgtgattcatcgcaggcatacgatgcttcacggttaccaccggtacagcgaaaagtgctcgacgagctcgaagcctttggtttgatctataaacgagcagtaagcatgtcatcggccggttagacctgaccgaccaacgctcaagttcggcttcgacagaatgtcccaaccggcaaacacgatcaattctacccgacgcgactggccacgaatttatgctcggggaacgtggcgtccggcggagacggagcgatgggcggagcaggggagacaagaaaagggtttttggtgctggagacgaattacaaggtctacgcatatacgtgtgagtctactgagtcgtcccattggggccttctgcttgtgctgatacgcaagatgagtggcatcagccaacgagctggagattgccatcctgaacttgtttatcgatatccggacgcgatatccgaatttgatcgtcgggcggttagagagagatactgtgaaggacgccatgaagaatgggatcactgccgctcaggttcgttttgacccacaaccgcatttcaaggccaacgttgctgatgaagtgggggaatgagcgcagattatcagctatctgacaacacatgcgcatccgcaaatgttcaagaacgtaagtgctacttttctccttgtttctcaaaaactccgacttacgtggaactcgctcgcagaacccgctattaccgatcacagtcgtggaccagctccatctctgggatcgggaacgaaatcggctggacaagaaccaaggtaaggacagtgcttctctgcaaaactggcgccgaaggcttacaattcacttctcacagccgcccttttccgattctggaggaaggacatgtacgaggattctttggcgtatgctcaaacgatcgcggcgctgctctggacgacaacatccatggaaaacgctggcgggatcgacaaggtgttttcgggaatcatcgttgtccacgagtcgctcagcgcgcctttcaaggcgtatgtcgaccagcggcgggaagattaccgcctgaccgggtagattggcacggtattccctatatttgccgatacggctatgattgtccgtacttgtacatccgatttaacgaaaccaattgtgcaacggcgacggctaaaagccctcgaaaggtaccagcatatgaacgtgttttcgcacctacgttgaacgaaacgagccgatatactgagccctgcgaaaaacgacaagtggcggggattggcaatactgaaagcgagacacggatttctgtgcctgcggttggacagtaccgttgtgttcatacgttaagcggaaaagatgggtcacgaagagtttcataacgtgaagatgactgattagatgtttgttcgcttcgccgacagtctcagatttgttcaaagtccagaaacatttcgctcggaaaaggtgcctcggtattttccagggaccctggaggcacatctgttccagtatcgacaggccccttcaaaagcgtagtgaaatttagatgagcaccgacaagaacgtgagcgggagcaatataatgcggaagaaatatccttcatatcttcactcactctttcgctcatcagtccccttggatcgacatctccgtggacttcggggaacagctgggcgattgagaagggcgcaaaattcatgacgttcgattcttcgaagaaattatcattgctggggcaagatctcaggagtgaatctggcgcagtcacttggtcttctctctgttcccgccgcccgaaccaggtatgttttatcccagacattccgctctcgtccccagacattccgttctcgtccaacgttgatgctagctgagtgatattgagatcaggagacggacacacagaacgctgaacatacttacattatctggcatatctccaccatccgtttgagggggattccaggctccatcgcgacagtattccagcagctcaaaataggattccgactgcgtgggtcgtgggctatgtcagatccttcttgggcaagtaatcccggccgggactcgccttccactcctcgcatttctcggcttttctacggacggaagcggaggtcaatcgcccgtccgcatccgtggcgattacacgcaatctgttagcgagccattgccagactacaaaagtatctgagtcggaaggtctgcccatgagtccgctgacactgagcaagaaggtgcccatgggagactggcggaccatcttcctgtctgacggggtcaatttgctttcccgaaagtctgacatcactcgatcgatgagtgtgaagaatcgcatttgcttgtgctcatcctttatttgattccgctcgatgtactctttcagatccgcttgtagcccatccacactatcgtatcccttaccctttcccacgtggacgtgtttggtgtgtccatcgtggtgatccatattatcgttgagggcgttgctttgactatgcgatcgagttgcttgcgacctgccgttagtttcggacggtaactttgcgcgggcaaatgtgcggctcggagtcggtcgactacttgttgctattggaacataacaatcttatatgcgagatgtaggtcgactctaagtaaataagcgagtttcatatttcgccgttcctttctctatgcgtgccattctactcgaagctggctatgacgtgcctatccgctcgacggatctcagcggtcagcgcgaccgcttcctttgaccctcaaatgcaatcgcagtcgtccttcggtagagtattcttcgaggcggcgtcttcaggctagacattgcctgatactgccgtcctatccactgtcctatctcctagacctaggtactatcatggcagtcccaagcatcgagatactggcttcagacgtaaaagaaccttgaacaagcggatcttgcgaatagagtggaaccctgctgaataggctgaactctgcttccttcgagggtcacctcgaggactgtacgaaagtaacatgaggatagacaaggggcaagtacgagcgaataattcgaatgacgcgcaatgttctagctcgtcgcctttctgagctattggttatttcaggctggactatcagaccaatcatattccgaagagagaccgcagtttccgacattgtcggtatcaatattgccctacactggcaatcttgttgcccattctctgcaggactgccgctatctacgagtacatcccggactatgccttactccaagacccatcaactgttagtttggcatgcttatgacgatatcggaattggactgtcgcacgaccgtggttgtatcacgccatcgcattgtttgcagcccaactcaaggctgccgatagttttgctaccagatctcaaagcgtgatgtataacctggcgcacttttccttcgtactattcagcccaaccccgaagcttcacgctgctgagagttaacaacgggcgcgtctcatacgggataccggcaggaaataatacggtcaggcgaaaagatgggtcgcagaagacgccccacatctaagcctggactgggcttaaagatatctgtccgggatagcattgattgcagggaacgatttgaagatcatctccttcgaaatcctcaatttttcccatgagatcgaatgatgtgcagttccaatctcatctccactactgttcatcagagtcagtagtttgaaaaaagccataattctttatctcttcgggcgatatcatgctaaagtcgcgagaatagtcttcaagtcaaatgtccgtagtggctgttcagtgctttgcccggacacgttctggtgaacgagactcacttgtttcgttatcggtgccgtcgtcccgagggccacgctcgttcgaggttgtttgaatctgctgaggagttccataaggttgatcgcctgtcttcaagtctaggaacatcgggtcttgtgaagaggcgcgggagaccccgtccgccccaacactgccaggctctgtctgatcctacactgctctatcaacatacgtatttcttgactgggaaggtagctgttgtactgtcacttactccttctattaccgttgaagctgacggtactgtgtcgtcgaaagacagttcaggaaacagctcttcagtactcatcaaaacatctttgtcccagatacggcagcgacacattgagaatcaaacatcacatgggttattcaagacgtatgtctcgatcctactaaccttcaaacctgggtactatatcccaaccgcccttcgtccacgctccatcattgcaatagtctaacaggtcgaagaacgattcagactatggcatgatatgcagataagctcggtctgtctgtggcttcgtgcagttggtccagcgactctcaccttccatgcgctaatgcgttttgccttatctttgtaagaggaaagcgataccagatggtccgtaccacgcccagctatcatgctctttctgtatttctcgacaaactcctcaaaccagaccgtatggatatctttttttgactccgtactgatgatcgtagcgaccctccgaaggaaggtcatcataggggcgctcctgacatcttccttttcgattggtgtcatgtgttggcagctaagttcgtaatcgtcaacactctgactaatcttcttccacagctcccatacccccaacctgttccgtagatcgttcttttgcacgtacaagttcatctgtggtctcaacttgttgtaagcggcggtcgatttttccacaggtacgatccggtgtcttcgtttctctccgtccgacatcggagtcaacgtcttgtgtactcgtacgcaaaaaatgtatcgataccgcgggggtcctcccttgctgaagaatcgaggaaacagaccacttactctcagatcatggcctatatagtctaggtctattccagaagtcggttttccaattattaatttgtctctcactcctttgatctttgatggtcgcgaaaacgccgccatcagattgttctattgccattagttcgagcgtgtttcaggtgaaccgcacccgttgggcttcgatagatgagcgagctattatatgcaccgcggatgatggcgcgttgctgcgatgatcgacgtgacgtcacgccgtcatcacgccggggcctcctgctcccccctgccctccacccgctgtgctgttgccgtgccacgatgacattcccttgatcaacctaccattatatactgtaataccatttaagcatttaagcaacaccccattcacatcccccaatcacacaaacaaacaagcaaagtcacttccacttaaacaacccgtaagctgatggatgacttttgctcgaccccgctcgttggatctcactcctgatcaaatcaattctcatagcccaaacacacacgcaaaaatggataactttgtcaacctcgccaagcagtttgccggaggcaacaacagcaacaacggccagcagcagcagcagcagcaaggtcaaggattcggtggtcagggaggacctcaattcaacgctccccacggctcgggcggttcgtccggtggattcggggacatcctctccatgtgtacgtttagcgccttttcgtttgatcgacaacatcaaaccatactcaccgatcgcgtcccccgttccctctattcctactttccaactcaacagtcaaccagggatccgcagtctctggcgctcaacaagaactcggcggtcagaccgatgaacacacccaatccattctcgcccagggattcgcccagacccaggcctttggatccaacgccgtccagcagggcggagcggttgacttgaacgaggatgggatcatcgatgattacgagcgtgcttactctaggggagaggctcagaagggtcagatgagcagtgagagtatgggtactgccgctgccatgtcggtaagcactatctcggtcgcacccacccttcatccatcgacaatggctgatcttacgaccttattcgaatgactgcgatcgcgatcgtcttccgtatgacaggccttcaagaagtttacgtcaggcaacgacgcccaaaaggctcagtcttcgggcggtgggaatatgcagtccaagttgatcgggatggccatggccgaggccatgaaggtcagtcggtcttgcacatctcaaaactcatcaaacctcggatcttcggtcgtcttgacccggtttccggggcatgagctgggtggcagagtcgtgaacgctgataaccttttggttctttcgttttcgtgcgctcttggtagttgttcagcagctctggcggtcagactactaacggcggtggacagcaggacgtcgtcaacgccgctggaaagcgtgagtccggctctgccacacgatggaccttgccgatagatgggatagataggctgacgtgcaagaatcggcttggccttgtcgttgttgttgctcttttgctcttgtagagatcatgagtgcgtcagatcggtcgtcgtgatcagggtgaggatggttactgatgtttttgttcttggtcctgtctggttgtgcctttctcgttgcgtcatccagagatgatgctcaaggtgagccaaaaccacctcgtatgctcatcatgatcaccgtgctcatgtcatctcattattcgtctcgcttacagtcccagatgtctggttctaccgggaccggcggtggagcgatgggcggcttgatgggcatggtgagtctcgcccggacgacgattctgatgacgaggtgcgcatccggttaaattccataaatcaacaggcttccaagttcatgtaaagcaagatcgacaagccgacaagaatggacgagttgttcttgttcctcggagatgcctgaaaaacatctccccccgagtcggatggatcgtactacacgccaacgccaacgctaccttttttttctcgtgatgaaaacgaaaacaatgaaatgagaaccgaaagaacgagacgaaggatttctttatgcttgattgtttccccctcgtacacacgtatgacaatgattgaatacacgtctacctttacttgaccttgggtttcgatgattcttgaggattaggtatgacgatgttggctctttgggggtggagattaggttatggttttccaccggacacaaggggttttggttggcactttgtaaacaaacctgacctgacctgatctccccaagaaacgtcaccgatgaccacactcactggttgctatgggaaagatatccttgaatcgttgaatcacttcctcatcctacttcggatgatatccgcatcatctctagattcatctgacactcataatctcttgctgcccactctcaccaaaacaaagcgatcgccccgtcgcgatacgacaatcgataatcatccccaagaactacggaacatctgggggatgccatcaacatgatgtcctacctgatttcccgtctactcgggctctcgacctttactcaggtcttgtaccaactcccactcaccctcgactggctaggacccccatccttcctcttcctctcccttttgctcttcatctatcaatgctcttacgcgacctttcgactgttgaccaagaacacccctctggcaagtctcatggggttatggaacctcgtcaacccgtttgtgcccaccctgtgtgcactggcgacctgctggatgtacctctaccccccgcccgagttggactctcaggggagctggtggaacgtcggttggaaacgattgttaggggtcgtccttcccggtttctacgctcagacgttgaggctcgtcagccccgtgttcagtctgctggaagggttcgccacgttactagtgggtctaaaaacgttgaagctcgggttccttcaatcgatataccgaagtttgatcactcgtcgctctctagatcgctcaactggcgggaaggatgaccaaggggttcatcgaggattcgcctatcgcttatgaaaaggaagagtttgaatggcgaaggttgtccttcctggtcgtctcctccattatatactgttcgggagccacatggctcgtcatggtccgtgtgctgcactccgaatctcttaacacttagcgaaagctgattaggcccccgtcgttccccccgccgtagtcacacccactctcacctcctttttcaaagacccaacttccacccatcttcttgggactcgcactcgccaccgtctttttcttgacgatcatcgccttttcgagacggagcgcgacgtcgatcgagacgtcattgatcttcctctatatcatctacggagcgtggatgagcggcaaggaggagctgatggagtgagtcatttgcgagggaaagatcgagaattcggtgtatctccaccggaacacatgctgacactagccaatgtctctgccagaccgagagactttggttcgggttggttgacgaccggatggggtcaagccaagaccctctcgtcccaacctacgttttcctcaatccccatctcgtctgtcaacctggacgccacgtcgcccaaatccatcctcgccgcctttctgtccacggtcgggttcgctggagcagtcctcgcccgactgttgggcatcaatatcgggtttctctccagcttgggaggattagacagagtcggtcaatacgttggcatggactcggcggcaccgctcatcaaacccggacacgatctcgacgtcgtcggactggccatgagcatcctcaaccacgcttccgagacgatgctcaagattgccaaatcactcccaccgacgctgttgatctcgctctgttaccgactgctcgtcctgcataccgcggcccggttcatcccggccatcaagcgggcggcaagtgggtgggacgaaccggtcacgccggtggggggagaggtggaaaagacttcgagcttttggagcgatggcaggagttttagcgaggaacgagcggtgagctagcggcgtttgatgcaaggaggaactgtgtgaattgaacgagcgcgttgtaccctacagagttcgcgagtcacgacgatcttgctgtcgtatcgtcgagccatcttgatagcagtgtacacacacctgctttgtgagtcaaacgagatcgagaaccgaaagccataccctgacctatgcttttcatagtgcttgacaatggttcgcaagtctggtggaggtgagctggctgatgcgagcatgacatcggtcggaagattggtcctgacaaacactccgtcgcctcgccttgcagatgggtcaacatctttgtcacgctcggagtttgggcgctcgagctcaatgtcgatcgggacgactttgacgacgatggggagagcatcgtctcgtggaatcgcgattgacagagggacgatgagttttcactagaatcaccagctgtaacgactaggttgcgaaggatcgtggaatgcaatcaaaagggtacaacggcagaatctacgtgcggctttcgaaatttaggcaccggtctcgggtgacgaggacgatgtggtgatcccgtcctgtgtcttgcgtcgggctgctaagccgattttgaacaagttgaacccggaagatcgcggcacagggctctgaggcgtctccggaacgtccctgaccatcgcagccgaggcagcggcagcggcagtggcgtccttgttgtccccgtctgtgttctccacgacggccaagatctgagcggcatccttcattttgtcgttcagcgcaaccttggcttgcttgacgacaggcaacaagcgcgtgaaccccgcctcgatccgcaggatcatcgacttgtccccgtcccttttcatccgggatgtccatcgacgatcgtcaaaaagccggaggagcaggatgtagtgattccacagcgcctcgtacgtctgataagccgaggcgaggttgctctgtttgaatctgagcaggtcacagaaagtttcgagcgccgcggagagtcgactggtctcgttcaggatgtcttcaggggtgacgtcctcggtcgtaggggatcgagcgtcgatgggcgagagacccgtcggggcgggcttcgtcttgagaatgggcgaggcggtcatggttgaatgctcgcggtagtgtctgtgatatgatatccgagttgcagatactggtcgtcgtcgtcgtcgtcgttgtcgtcgtgaaagtgagttgtcggagtggtttcctgaaggtcttgaactgttcgtataggctaggtagatatcccatcgaacctcgtccgtccgatttatatgctctttgccccgtataaacgaggcaagtttcatcctcctagcccccctttcgcctgtcaaaggaatccttttcttccctgcttcactcctctcctccgtaggtggccgcatcggtttcgcacgtcctctaccaccaccctatcaatcccgatgcaagacgccgttcaacctcatccactctcctaatgcgcgacagtattcatctttgccctcatccagcggtccatcgggattccagatggtcaggctggagaaggtcgcttgtgggtggagggtccgggagaagagaagcggggcgggttggaggagatcgagctccaagtccaaatccagatcggcgccgggtggcaggatagaggtactcaggtcctcaggaagagtctggggacttctcccgccaaatggggcggtggtcgtcgtggtagtggtcgtggttgtgctgctctcgagcacgacggtggctttctccatgacgaccgtctccgccttgacctcgctcgtctcctgtatcacaacaccttcatcctcgtcttccttctgcttgacgtcatcttcatcgccatcttccgaatccgaatccatgctaaacttttgcatgaccctcttcggctttacacgtcgagtgaccggaggctcgaggacatccacggcgttccgctttctcggggagcgtctcagcccgggtgcagaggaattgggcaacggggattcttcccgtttgagagatttcacgggtccggagagttgggtgacggatgagggttgtaggtgagtggggttcgattgtgggggtacgggtggggccgtgaggacgagtccggtatacccctcaggtaggtcgagggtatgcgcctggaccctccttcctctaaacgctgcgatcgtgatggtcttatcggatgtaccgtccggaccattcaccgagttggatggatcgggcacggtgcgtggctgaaagtaggtcgagatctctgccgggccggtatagtccaggtggaaaggcatcagattgatggccgtggatgcaagctggggcaagcccgtcgaggacggcagagccaggagcgtctcgtgctgagaggccgacatttttcagcggtgggttttgtaccaaagcagtgcgagtacgtcgacaagccaagttgtgtgagcgggatagggatgaatgtcaaggtgcacgatgatgttacagctggagatcggggtctcccccctaccgagcagcaatttcgactcgaacgcgtttcaaacgcgtcgcgtgattttttgtggaaagaaacgatctcgaccacgaccaccacgacgactagctacacttttatggattcgcaaagtatcgtcatgcatcacgtcgtccttccaaccgctcgtcttcgcaggaacagctcgtctcgatcgcctgatacacccgaacctcgaaaatggcacccctgaaaccacccgcgttctccgacctggaatactgggatcaccgtttctcgagcacgtcgatcccgttcgactggctcgtcccggccacctcgctcgattcgctcatcctctcttctatccgatcgcgagacccgggtgcttgcaagatcttgcatataggctgtgggagctcggaattatcgtacagattaggagaactggctcagaggccggaggacgtgtggaacacggattactcgagcgtggccatcgagcgaggtcgagcggtggagggagaacgacatgcacgatcacgaatgtcaacctcgagtcctacgggaaaagctgaatcaaatcgtctacgggagactgccgaacaagcaacgagccggatgaactgggaaattctcgacctgctcgacgatgattccgtctcctcccttcaaagtcaaacgttcgatttggtcgtcgataaatccacgagcgacgccatctcgtgcggcccggacctcacagtacctcttcttcgtcctcggactcaatcacagaccgacggatctatcgactcgatgacactccatccgctagacatcctcgggatcaacctcgcccgcctgacaaaccccggtggacgatggttggcgatcagttattctgcagaccgatttccctttcttcctaccctaccatcaacatcatcgcgagcttcgacctctcgaagtgaatctaccgatgaagagatccagacggcagctcggtattggcagctagagaagaaggaagagatcgagatcgaggtcaacgccgagccttcggtaaacgagggggagcggccggtctttagaccgaaagaggtgaactatttgtatgtcttggtccggacgcatgtaccctacccttagatgtacgagatgcatgcgtatgtgagacgaagggtcatgctcgatgtgatgcagatcgggtcggaacggagcgatctttctctcaagtgggactgacgttcttgatcgtcccgaactttctcggttcgatgtggtatgccgtgtacgggctgatatggatgggatgaagctgaaagtgggacgaatgggtgacgaacctatttcggcgggtcgtgcgcgtaaagaggatattcgagcaaaatgtcgatcgatggacgggaatcgaacctcgacctcgcgtcagatccacctgacctgctcagcttttgaccgacgcaaaaaagaccacctcgtcgatccctgaggcctgtaggagcgtaccagcacatttgcaaaaagaacaggacacttgccaaaccattcttcccccttcgatgcctcccgaaccctaaagggctcatttgagggacatcgccatcgaagagtagctttcttgtgtgttgtgattttaccactacaccaatactcgcggatttgtttgttgaacaaacacactgaaatatgacttgtaaaacacgcactgaaaaaaaaacaccgagcatagcggtcctttgacttggcttacccgttaaatatccgtcgcctgaaaaggtcacaggcatgcagaaatccagagaacactcgaccaatctagcgtgtcgtgaactgatcgtatattgtggtacatcgtatgtacgtgcttgtacaagggcttccaaaagacatatagcggtggtgatgatgatgatagtcgtagggaaaaagaaacaagtcgtgatctcgccaatctttatcgcttgacccatgtgtactatacgcaacgaacagaggaatccaatggtcagtctctgaaccaccaagctcgctgagctgaatcgacgtttccgcagactcaccctcttcctggcctttgccaacccagtcttcttcctctccaccatcctgggatctcgagtcaacagtccgtcccgtcgaaggatatcggccatgtcgggcaggaaggtcacgattcctctggcaatgcctagggcggtcgctccggcctgaccggtagtacctccaccggaagccagggcaaagatgttaaagtatccgagcgtacccgttagacggagtggtcggaggacgagttcacggtcagacggtcgggggaaatgttgatgaatggggagatggttgacgaggacttcggtggtgggcaaggcggggtaatcgggttcctctgtcgactcgggctcggcgacctttctggcgtgaatctcgagcgccgtctgaatcctcgcggtaaagtcctcgggggtcttggtcttgatcaaccagaccttggccgaactctcctttctcctccccgtcgtcgttgtccgtccgaactcgtcgatcgggctcttcttgtccttggtggacttttgcctggcctcgcgaggttgcttgtactgctcgatgatcgagttgacgttcaggacaacctcgctctgtcccgctcgctgcgcgatcctcctcaagagggcgaggtctttcagcagacccgtcacccgcttgaattgtgcccgatccaacgacgtcccgaacctcgtctccatgaccttccaatcgttcttgtcccaccctccggtctcggcttctaaccgcaatctagagggaagaggccagatgtgtttcgtgcggagcgcatcctggttctccttgatcgcgtcctctaactgaacgatggcgttggcatatagaggtttaccggtgaaaaaggtggaaagggcaggtttcggtcgagtcggcagaggttgaatacgagagttggcttgatgagggacgtaggcgttgggcgtggcatacgaccgcctcgtctgcttgagcacgctacaagcttgtcgcagggtcggtcgggcggctaattccatcgtgagcgctggaacaggttatggtactgtgctgtagaccggggaggatcgataccgaagctctaccgatacacctataactatccagattcatgatcacttcggtctcgcactcgtagggtgcgaaagtccaacaagcgcgtgatctttgcgcttccagttgacaattgaccccgaagagatatggtcaaggtcgagaatgtgtatcgatcacaacgggactcggtacgggacacacggcatacagcttacagtacaggcgattacaacagctcgcttcttttgtgagacacgcatggattatgaaagagtcgaggagattagtgggtcatgggtcacggacatgtcgagaattgttcgggcaaaacgtgaaggtcttgtgcaggtctgacgagtctattgcggcgggcctgagcgtagctggtcgtacctcggcggcatctcgctgcatcgggatgggggcaaatcagttgatggctttgagcctataaattcgagtttgtcacttacaccaacccttgatcgtccggccgggtcgcctccgcactatccacgacgccagcgtcttgatgcaagacgaacctggtcggaggtggcacaggcacgtcgtccccgttctgagccatcaatggccgtctctttctcgtcgaattgcttcgccccgtcgaccccgtgtttgctgccaccggttcgctgctcatctcgggttgcctgggcgagacggtcgctcccgaatggctcagagtagcgtccgcctcggagccgggctgatacgtcccgtcgctcggactcctcgtcgccgtcatacccaccatgcccaaaccggcaggcccgtctcctccaaagtccataggcgccaacatgccactttcccggctgtaccgattttgagccccgtttgacctcgccgcgctctgaatgtcgtcactcgttctagggaagctcgatcgattccccccgacaggtgaactctgcactccggaaaagtatggagaaggctcaaacgtctcgtccgagtcttgtcgctcgatcgctccggccgtcggtactccgctcgagtgggtcgcttgacgaggtttctctccagataaaaggtctactacgctggacctccttcggtctcgcccatcctccatcatgacagcacctcccgccattgcgcccgttcctgcacctccgtttgacgtcccatacgacccgatcaacttggtccgggggtgttgaggatccttgacttgtcgagctcgtcggcggaggaagatgaacaggacaatcagggcgagcacgacgaacgcgactccaccgacggcgcctccgacgatggctcctgtactagaacccgaactcgagctgccagatgcattatgatgagcacgacggttgcaagaacggtccgaacgatcctgcatgaaattcaccttccgcttgccgaaccggaaccaccacctcctggtcgacctccaccaccgcccactcctgagattgtcggtgccgctgcaccgggtgcgatggaagatggcgaactgtcagagatacatcccgatcctccaggcccgaccgtgaacaacgaggtgctgcaccggattgccgatcattcagccagtgccaagaaaaggtacgacccatccgaccgtcgacttacctgcctccgcttcctaccggcccggcgtcgggcatgtacatcaaaaacctcgttccctctctaacattcacctcccacgagtatccctgtcccgcggctccctgtccgccgccttgatccgggccggtgatatcatgtaccgtccatatctctccgccagggatcaagccaacgatgctcgccgggagtgtataactgttttgccaggtcacagcgatccttccgcattggggcaccgtcgtcggtccttgcgggtccgtataaaagaagaaatccggatcaggagccgtggtcaagcagctcgaattcccacccgagttggacccgacggtgaggaggtcggtaacccccgtattgctgtacccggacgagtcgatcagggaggccacgaattcgagaccctgaggttgatcgaacgaagggaccgtgtatggactcgaggcggatccggggattgtgatgtttctgataattgactggggtgtaaactgtgcggcctgatcacagccagtcatgccaagagggtgaggtcagcacttcgttgcgggtagtctttccgagcgagtttcggaacccacgggcatgatcaaaagtgtcatatctccatcgcccgacttgtcctcccaagtgacttgtaggggctcacattgcatcggcgtagagatattgaacctgatggcatgaccgacggtcgacccgatgatcagagcgagtgcgagccgggatggcgagttgatacaaggcgacatcttgtcggatgggtcttttcgtctgatcggagttgaatagctcgagaagctccccgatgacgacgaggtctagaggctgtccgttcaaaattgcctcgtcgtggtgtttctagcagatgcagtctagcctaagcctgcttcgacccgttatgctcgttgatgacctgctgatgcgtctttcccggatttccttcttgacaaagggaaaggtcgctgtcgctcgggccaagtcgggtcttgtaaggggcgagatggacagtctttgtctgatctctgacgccttgatctctcagctttgccctggttgtctggcttgtggccgactacgttgagaggaggaggttgtcgggattgtctgatcgattgatgacgaaggtttattctcgtctacaccccgaaaactcgtcgtaaagcagaagaaagataacggactcccctccggtcttgacgctctctcggttgaattgtaatctcgtgatgggcgttccagattccccttgaaacgtcagagtaggtgtctcccgatcgaaaggagtaacggcaagctccaagctgtcggatctcctagaactgacgagccgatcgatcgagctgacgagttgccaaacgtcgtatcaccctctgtcgccttgtcgcctggatagtttgctgataagtgacgggagtgagtgtgtccaagtggatcgctcgtttgtgaattctttgcacgatgacgtcttttgatggaaggaaccgcgactcggtcaagcgcgaagacgaggacaagcacaaggagggtggttcggtacgttcgaccgctcttcaatagatgtccaggatgaagagcagttcctcctcgatatcgtacatttacaagcgtatcaaggtcgatcgacgatacgcaaaatgacgagctttgaaggaccggtcgtctcgcatgaattcgaagccttcgttttgattgctagtagatgaggcgatcgaccagatcccgctcggtctcccgcacccccgtgtcacatctcatccctcgccttgaatcgcatcgtcccacccgccacccggatgcttttaccgttcagatagggtagaacacctggctgcgatagcgagaactctctagcttgccaagatcaggaccgacccgaaccctccggccttttggttctggctggtcggtcagtcatccaacccatcccgcaatcagcctgggcacccgagggggggaaaggggggaaaggacgttgtttacgttgtcatggaaccttcacaccctgcgaaccgaacgccgagcaattgagcgtcagtcctagcgcgaaccgttcgctctcggtaggcgaaggtgaccactcgatcgtcgacgagccggctttgcgatcgagaggcgaggccgaggagcaaagtgtggctgtgctcgacgagataaactagtaggctgttccgaagaccattctgccgtgctctcgatcacgctcggcaagcacgtcccccttcccggtgtaattaaccagccaacaaagagggccggacgaataagataaagtaccggccctgacgtgacatttcacgcttggcaccccggcgatccgggggggggcgacgcgtatgatcaaccggaagaagtcgcagatgggtagatcgtccttgaaccatgattcgaaacgggtgactgcctctcccttaactgaatgcaattggtgaattgcggttagagacaacggaatcatgtggcaatgccacgaagggtccgtgatgtggctctgctcgtcatactaacggtcttcgggagcgagatcggtgctgattgggaattgtccatgagtgcatgcctcgggcctgcgatgtccacccatcttgaaaaactgatagtaatgtacaagccttggtgcccattctgcgtccgaatcgacgggtctcgacagaccttgacttcgtttagacgaagaattgctagtggcatgccgacctatccatcagcatccctccctcgaccgtcaagcatgcctgcacgaagcagaaagtggtgtcaagaaaacagacaagcttatccagttactggcatcaaccgtgacttgcaactgtgtggcctagatgtctttcttgaacaccctgcatcggcttgtcatgtgtgcatcaaaacttcggtcgcttcttctttttcagcctcctctatctgcaacgtagccaaagcctcgttgcccgctccgtagctttccatcgactcgcagcagtcacgtgccccaagtcgaggtcattctgccgggtctccccaatgaccttgtcacgaggactcctgtcaaactcgtctgcgaggtcacgggagctagacagctatttgatgtattttcgtcattctcatgtcatagccattcgggggtcgtgcatctgttgctgctcgtcatattatacagaggcgatcggccagtcggtgttgataaaggatcatttgactggtcctgccccgtcgcaataactcagagggtcgacctgccagatcatcgccatcagccgtgcagatttcagacggggaacgtcgggtcactctctcggagcgcgttccaaatgtgtgtcgagacggccctgccgaggtttcgttcgttttgtacgccagtcttcaggtgtcgtacctaaggtcagatggacgtgtcagatcaagttcctgtgaggctgggaacaaaacagggcaagtagacctaccttgcacccctccaacaggacctttcccttgcctatgccttcctcttgttctttctgctcgaaaccctgcatcagccgtcggaaagatttccattcctctgcgatcccgaccgaaccactaggagtaacccccgggatctcttgaagcatgagctcgagtgcgtgttgtttagaactgcccttgagatggttctcccgtccgaggggaagggtatgtgatttcgagatcagcctgcaggtgtcaacacaaaggctggtcagctcatgcagaagagacacccaaaaggtctgttaggcgtatgcctacttgtactgatgatcgatcaaacaccgaacgggggatatcgctcgagatgagtgtcacagccatggaaaatgtaagatcgttttcaacttaccggtcgaatagaaagatctgctgtcatgttatacaaccactccgagacctcagcaggcgtgtcgactactcatgatcgaagggacaagcagaaaaatagccctttccctgttagtcatagcgcttcccggatgttaacgaggaaactgaccttggacctgcaaccacccatgcctcaggtggatggccacgagctcgcgctcgatatcgtccttttccagcctgggcgcctgcgtcttgccctttgtcgtaggctttttcttacccggagccgattctcccgaagccgacccctcgatctcggccaatgccgccttggccctcgctgcaaactctcgttgggcggcggatttcgtcttcgagtggtacgccttcatgccgtggatgacgagcatgattccgggacgtccgtccttgtctctcgggtacgtcggaggttgttgtccaaacgggacgtcggtggtcagcttgcaggccctcgcatggatcttcaacccggctttgagctgatggatccatccttcgagcgtgtcctccggtagcacttcgtcaggctggatcttatcggccttgagatccagatgacatcggatcttgtcgaccagctcgtctgccttgataaagacgaccgccaacccctcttcgacccaggcttccttgtcctcctcgatcggtacccacacgccgcgctccccgtcccaattcgctcggacgaatcgcttgaacgtgattaatccgggacatgcggcccgctcgaggggtacgatttccgacgagttttctcggaacttgtccctcaaagcaggtatggcggcagcgataggagatggagtgacgaggagctcaggtgagagacacagcttgatctcgcgtagggtgtcggatttggacgtccgtaactgatcgcgagaaagatttcttcaagtcagcgtaatatcaaacacgctcgacccgcaagctgaactgaccttgttgacctcggtaaaacgtttcttccggaccttttcggcctgcttctcggcttgtagtttcgctttcgcagctgccttgtctgccttttcctgttcctttgtacggctcttcttggcgacagggtcagtcgagctgactcgctcttcgatcggtctaccgcgtttcttgatgatgttctttcgcaagggtataggactcgaaggaggattgtagttcctttcctcgagaggtacaggggacaatgagctggaggaacggtcgttggttgtggtcgagcgttgtcgattgcgaggaggaacggcggtacgagtggcccttggttttggctggacgggggaagtgaacaagtctatatcgctctcctgagtagcaatacgtgcctcagacaagacagagtggtaattccttggcaagatcgaccgagtggctgtaagagtccgaagatcggggagatcgtcgaacccatcagaggagggcacgaggatcacatcgtcgtcgtcatcgctatcccatgccgtatgacgaaacatcaatcaaagagcgtaaacagcattgcgaggtcttactcactcgatgatacttctcgcaaaccggctaggcccagctacgatcaggtcctctccatcagacagctcgatcagctcgatgaccgagtccatctttcggtcttatcgactccgagtcgaggtgcgacggtaccgttgtggtcaagatgctgatttgttggcggatcgaacccgctatattgtcttgcgatcttgatcgacagaaccgctgctgagagcttggtgagctggtaattctggtaaggcgttgcttgaagcgacattttttgcaggttcgtctgggatctggtagctagttagatgatgcatcccggcacaacatgaacaaacaaagtaaacaaaagacagagacggccgcgagctagtagctacgagggtttgggatggtgagttctcacgtccttgcgccggctgaagggttcagctgtggatcaagctatgacacggtccagatgtaacaagtagggtattgagaggaaatatgaagctagagaaagggcagacactctgacagctaggtgaataatcatacgagatgtcgttcagcggtagtttccgatttctgagagctttgtttgacaaacgcgcggatcggggtccagctgtgactcttggatgctgtgcatcgcaacaatcgagcctgaaagtgaatcaagagcatcaccatcctgagctgtgcgactcaaggcttgaagcagtgatagagggtctgaccagtacgtgaatataagtaaggggggaaaggaaagatgtctgacaggcatggcaggaatcgcgggggtttgcggacgagaaaaggatccgcgcataacccccgcggcgggaagtgtaagtttgatagaatagtgtgtgctttctcaacatcgatgtggtactagtatagtggttagtacttctcgttgtggtaatttcgcagttgctggatccgaggcgacccccgttcgattcgggggtaccacagattgactttttggccttgttgcgctgttttccagtcaacaaccctcagcacctcttgacgcctaaaggatctttgcgtgacccttgaaccgaagcctccggcttgcttaagatagaggacccccgttcgattcaggggtaccacaagctttttgccctttctgcgctcattttcttccatccagctttacttaatcacttgatggcaccactgagcgccagttgtcatgtgacatggacattgaagtgtctcctagccggtggagtcttggccgcaggcgtcgagccgtattataaggctatggatgctggtacataaacggtccgttcgcatggaactctcgcccatatcatgtgaattctatcgcgagtcaataaacgcgcatcgcttcgtccctactatcaagcttggtcctttgtgttctcgttccaaattgtgtgcgactgcatgggtgaagcccggttggcaatcgcccatcccaacaaccagccccacaacaaggtcgtctgcgagcgattcgagatgtatcggtcggtcagtcaacccgtattacgcgagatcattggtatggctgtgagagcacatcgatcggacttacggcgatccatgtcaaccaggtgaacgcggctgcagctcttcccagactggtaaacgaccgaaccggatcagcccctagacaccgatcggctgcaaagtctcgctaagggcgctcgaaggggacaaacccgcggactcactcgcagttcgccaatctactcccacaattcgtctggtccaggtcttcggacaaggtggctcccgcgcctgtagtcccgataatcgaagtcgtcagctcgggcgcaaagctcgaaggggtaacatctcgatcgatcccttcccataacgaaaacgcatctcaaccagccgactcactaacgagtatgatccatacggtccccaagattgccagttcgacccataccgacttgatggccgtccctggtcgtccgatgtctgtcaaagcgaaaacgaggctgtagggacgtgtgtcatggtgtcatacgaaccgtcaagatggaaacagaggagaacggtagcgtgatcagcagacatcctcgaccgatcgaatacgggattgctctacgtgagctcacaaggctaatgaagcgagaaaggccagcaggttggcagctacttcgagaccttccgccgtcctgatgatatagtctgtccaccgcatcccgaggagaaccgccacgaccgagtgtgagcatacttctagaggctttttaagacgagccgacaggtgcagggatcgagtggctcacagttcttgttcacgaacccggcactgatggtccacccgagtagggcgaggaagcagatgagtccgaggaggccgacgtggccgagatgccaagtgtgggcggaaggcatagttgttcaaagggacgacctagagtcctagtgttgaggctcaaggtgatgacactgggttcgaaagaggaaacgtcgtacagtggatcggggaggattgttgtggttttcgttttcgttgttgtgcttcttgattactcgcggtccgaacgatgtagctgcgacgaacgagctcttacgactagctgctgtagtcgtttgtgtccagctgcgccatccatcgaggatgaactgatatggtatcttcgtccgatctccctttctttgccttgacctggtgacccctgacccagtatgccgtctaccgttcccgagaccactctcgctctacgtagctggtgatgattcatacgtactcctggcagcccaaagggggatctgcttccgtttatacctccgggtcgaaagcccgaggttgccgaaacaggcaagtggacgccgagacgatctagatgtcttgctgcgaggctttcaagaaaggaagcatcgaatttttcttttggaatggatgggcagatggtcaggggtctggtgcgtgacctctgacctctgtcacgactctatagaccattgcgttgcttcacgtccatgctgatctgctgatatgaagccgagagtgctagatcgaaggtcgaagcggccccctgacctgtgatgtctcctgcgcggcgcatccgaatcatgttgaactaactatgcgaccgccaagctatgaagccacgagagagcagatgtggagtctccttgttgatcacagtcatattcgacttggttcatcatcagaaatcggccaagacggtgggaaagggccctttggctcggtcatctccgtcggctccacccttaccgcgaaagggaaacaaaagagatgtttcagcgaccgggaaaggcttttttctttcgatctttcgatcagggagggaaagtctatcagccgatcgagacatacgaatcgaacgaagggaagaaacctcgagtgagcgcgtgatggagatcaagcgcagatttttgaaggctgggggaagggcaaagatgttacgggtttcatgatgaccccttgttctcgtttgtcgtcgtctgttgtttgttctctctcgcgtggttgatcgaggatctaggggaggacgaggagcaaaggtaggggcagtatccgtccgattgatcaaggacgacgatggtgatgagggaaatcatggtttccagccatctccccggtcggtagctcagctcagtccggatcgaaatcatatcgactttccccttaaatcgctcaccccagcttcctttctcttggtcccgaccatttcagatcgagtggacagctcccatctattcaaatcacttccctttcttataccttcacttttctcgcttcctctcgtccgattgtgaatctcttgccaggcccttatcccccctacatctgtggtactaccatcactaccgtctcttctttctactacctatcgacccatcatacctttctctctcgcaacttccgcatcgaattaaactaggatcgcttatacccggctggaccgtatcaatcaagctccaaaaaaggtctccctcgatattaactctgaacgatgcctcgtcaccctcctttctccctccctttcctagtcctcgtattctcactcttcacctccaccagtaatttcgtcaatgcagttcctatctcgaacctcgattggccgagccccgaggacattgaagcgggagcggtctctgtgcaaccgctagaaggggcgggggtgaacttgcctttgcgttcagtccctttcgtcagaagacgtaccgaggtgagtcctaatgggtatgaccgtagatgagccaaggcactgatcgtaattatcattgttccacctgtctatcatccaattccaacatcaccgacgacttgatccacacctgttcacgtcccgacgacgcgcagttgaacgatcgttctgtcctggaccagctgaacaacccggacaggcgttatttccccttccataccacctcgcctcccagtcatcccgaagcgtttctcccccactcggtcgacactcacatgagtgctctctccgaagacgcattcgctgacacggtgaagagggcgtacgtcaacccgatgttggaccatcttcgagagagctacaagcatggttctgccgatgtgctcccgtggaccgaagaacaaaaggaaggccacaagttcaagttgggcgcgatcattcagggtctagggttgggtaaagggaaggaggatggtggttcgttggagggtcttaagcctacgagcagtgttctgaaggctgctgcagtggatggcgggaatacgaccgctattgcggggaacctctcggctgccgcagaagtcacctttgatgcctggcccgccggaatcaagatgattgtccaccgtaagccaagatcagacttccttgagtttcagatcgcctctcgctaagcaacccatgaccaccctcggactcgcagctaaggggaacgccgcatccgggtattcctccaagtctttgtcgatcctccgagctcaggctcaaagcccggacgacctggataccgtcacccattcttccggcgctctggcagcccagagtgtggactacagcatcttcagcgtggacacggggtatatcgctgatatcgaggtaggaagcgctggaaagaagtattcgatgttgatcgataccggttcgtgagtatggtacgggtagccattagaaacagttgccatagagttgagcgactggagtgtgtagggccgatacgtggatcgggaacaagtaggtcatcgtctaggaaattctgggagctggaaagctgatccgccatggataataatcaacctgtccagggattgcccgaaatgtcgcgtgaccttgtctttggacgacagttcgacctttagtaagcctactcattgaggtcgattgtagctgtgaaaatgaaagctggacagcttctgacatgatgactcaatctagaattgggaaccaagaactttaatatccagtacggtctgggctctgcggagatgacttcggcgaccgacaagtttgggatcgctggcatgtccgtggatcagtttgatttcggttccgctcatactgtaagccaacttgatgagctggatcatgacccagacgaagcgcagctaaacaatatgtctcgtgtgttgacaggtggacgaccaatttacgaacccctcgacccctttcgctggtattcttgggacggctcaaggggcgagtttttgccctgactcgtagtttcgtgaatagctcagctgatcagcggttcgcctatggttctggtgcaggtgctgacagcacaaggcgttaggacccttcctgagcgtctgatggatactggtgtcatacccaatgcggtcctcgcatatgctctcggccgagttggtgagtatagagcacaaacatccgtgatgcaacacagatttcggaaagttgaacatcgccgtgtgaatagccgacggagagaataccggtcagttgacagtcggcgggttcgactcggcgaaacaaaacggcgagaccacccagatcctgaacgtcgtggatggtagcggcttttggaaagcgcaaatgggagctgtcatggtcgacggagatgtcgccatctctggcaatcgggtcgctctgcttgacaccggtaagtcgattatagctgctctaggaaacgtttgatcagtctaggcgctgacaatccgatgtcaggtactaccttgatgtacttgcctcccgcggacgcgaatgctatccacttgctcattgaaggtgctgctccgtgggtgcgagatcgcagtgacgtcccaccggaagatcacatttacgatttctttggcgcgatctttatcagcgatggacagggtggatacactgttccttgtaccatgaccgaggtcatctactttcaattcggttcggtggcgttcagcatcgacccacgagacatcagtaagcgcatcccgactccggttgggcacgattgttggctaagatgttgaatgtcaactttagcgtggctgcctgtcgatattaaccaacccaaggggcggtgtttgagctcgatcaccgggtcccccatcgacgacagaggtacttggctcatcggaggtgagtcgtcgccgctcgctccggcttttggaatcggcctgacgccgatgccgcatcttcatagatccattcctgaagaacgtctacatggtaacggacacgggtaacaataagatccacctttccggacgagaaggagctcggacgaccaaccgcggcgtctgaaagagttgataacgcaacaagcaaaacttccgttgggatttacgtgttgctgctgttgggcctgaacattatcagaggaaggaaaacggactttacattattttcatggacacacacacgggacaatagaacggacaatactgttatggatatcttgctttgtccctcgtttcgccgtatataaacactgaagagttaccgaggtgtgtcttggtcgatgattattattgttgactggccacatgcgccggacggtcgatcgatcgacccctgcgggacttggttgttttgtggagtccccacacggaagctctttgcctaaacttggctcaattcccgccctttcccgttgacgtcgtccgatcaagtagcaattctttgttggtggtttgcaaagagcgattgttccccatcacctcgaggcactcgattgcagtcgcaagatcctagagtgacgacccgctcggattactatttcagcgagagaagatccatagcctggggtcctcctcctctactgtaccccgcaccgatctaggcaacgagcacaaaccttttacgcgaccatctttatctggaagacaacatgcaatagacgtacgattgcctacgtgatccgacgagctaccatcacgacacccgtgcatatattgtgctcagagtcttcaccaatattacaatcgaaatagatatagacgtccctaccagtcagcaaaaggacagcctcacaggcgacctgacgataccatgaccgatatcaacgcgatcaattacacggggaaatactccggtctcctctcctctctctaccttacgctcggcctcggaggactttgtcttgttgggttcgagacgcttcgacatgtacctcgtcgtcgaggacaacaaggtgccaaagttccgaagaatcatcggatctaccgacggaccgctcgacgggcgagactcgagggcgagcccatagccaagaaacgtcggatctttagttgggcgtactggagagcgggcagacacaacaatatcgcagttcacgaggagaatgaaacgcatgagctacaagagcgtcatttcaaggagggtttcaaggccttgggcaaagaagggttcaccgacgaccggattgctagagctggaatggtacaacgtctgctcggctcgagagagagctgggagttcagctagtaagtggaccgatacgatgatatctttcgatcatagtaactaggagattgactcgggcttctctcaacagcttgtacgaaaatagatgttggaacgctatcaacccggcagagccattaccgtgcgtcgataacatgcctggcagtctatttagccacgagacactgatacaaggataatcacgtaaccaggaaatggcccctagtttggatctactccatcatcatgttccccgagagggaccttcctggccgagtcggtctcgattgtacagctcattcgagattcctgcgtggatcccgtgagttcaccaatcatcccgccgcatctgtcgttccctactgacatgtcatcatctcatttcaagtctggtatatcttcttgcatctgtgtaccaccatggttatcctcgcacctttgcatatcttttacgctccggacgaaatcggcagcgagtcgatgaacaaggctggaatccggtcggctcaaaacccgaatgagaggaggtggctctgggtgcacgtcgtgctcgtaagtttggagcgctttctgttcaggcggggcgagacttacatctagcccatttcggcagctatactggttggccataacttgggtagcgaatctcatctgggtcatttggggtgttctgatgtaccggaaagaggaaatccgcaagcggctggtcgctttgaggaacgaacacggggatcggaacactgtggtaattcaggaggagggggaagatcgtgagctgagcgagttgctgcctggccgaaagtcttccatcggtggttggcctatgggagaacacacccgtcccaatacacagcgcgatgaccgggtcgaccagactcagataagcgatggcgaaccttccccgaccgagatggaaaagacggccaagagcctcggtcttgatgctcccggatggaagaggtaccgcacaatcatggtaaccaatatcccacccgccatgcgggacgagaaacaccttcactactatttttccgaacaccttcacaaaccagcacctcctaaacagtggaaacacgccgcaacacacttcgtgaaaaagcaagcgggacgagcgcaagcaatcgcagggacgcccaagccgtctatggatatcacgcggaccgccctgggatcgatggtgataggtgtaaccgatgtcgctgtcagtaccggaatgaccttgagttcagccaggaacaagattgtcgaagatgtcgtcctcgtgcataagctcggagaattgggtcgattgcgcgagagaagagacgcggtcatcaaacagctggaaagcgtgagttcagatgaccacaacgctagagctggaccgtctaacaatccgcttgttgggatggtttgcaggcacatgttcgactcgcccaaagggtcatggacgatatttcaaagttcagagataccatctcggctccaaacccgcctaaaagagaatccttggaaaagctgcgatcgactgacgaggacggtttgatcgggaaaaacgtattgttaacggctttagaaccgttcatgcccggctgtcaggcgcatcaccggacctcgaccggggatgaaactctcgcttcaacgccaggtactatttgggaagctctgctttcggtacctcgagaatacctcgatccgtatcagccgctatcgcaccgatttgaccgtctacacaaggacaacatgccacttatcgactacctttcggccaagctcgccgtcttgaccgaaaaattggaaaaggccaaagagctgcctcttgaagagtatcagccttcttcgacggcgttcattacgttccggacagctgcactagcccgtcgagctctagcagagcttccatcgtcggacctttacccacttgggtgtcaaacccggccctgcccgcactattcagatctgatctggcctcgtctcagtaagagtgtctatcgtgctgcagtggtccgaggttgggttattggcgtgatcatcttcatcacgaccatcgcctggatgtaggtcgcctcaccgatacagcctcccaagatcagcaacgactggcttaccttgattttgcgccctagctttcccgtctctggtgtcatcagtttagcatccgtcgggaccttggccaacgtctttccagcactcaatgactacttggtcgacaaccagagactggcctcgttcatcacgaataccattcctgttattctcgttgcttcgatctccctgtcgatctgtccacttctcctggtggtcgcgaacaaggccgaaacattggtgacaggctacgacgtccataatgctgtcattcatcgattctggatcttccaagtggtatatttggattatttacttgcattactatcattggtgacaaccagctgaaccaatcattcttcggtcataggtcaacattgtgatcttcttttgcattgggcgaacggcagtggaatcctacattacgtctcgattcaggccagagaacgtgctcaacaacgttgcagactccttcccggccgcggcgccttattacgcttcttacttcttgatgtcagtgttggagccgttggggacgactgaatacagaagctgacttggttgcccgctcttgttacacagccaaacatcaatccagtctatggctgagttggccagagtcggagtaagcttatcaggtcgctaagtgtctacgattttagctgacttcgagctcggtcgcagctacccctcatcttctacatcttcagcatgcgcaaagctttcatcccccggattcgagactttcgtcttgctcactcgacagtgtcttggtttcttcaagtgagatcggtcctattttcgggcagggagcagaagtctgactaatcaacacaattattgcagcttcccaacgcagtcctagccgtatcgatctgcaacctcttctgcctttacaatccacttgtcctcccattctgctttgtctatttattcgcagcgcacggtcagtacaagtacgaccatgaattgatcgagtgctgaaatacaagctttacacggtagtgtcttatcgtcgaagctatctctatatttacggtagaagggtgagtcacaattccgtcacggccctcgattgaatcgacgttgaaggtacatggtttgcagtacgagaacaacggcaaacggaactgcatccggtatttgagatatagtttggacgtcttgctctgtgagtcgggtcgcactgctctttcctatctgtatgctagccctctcggacaaataattgaccgcatgtcttcttcgtaaacagtgacttgcgtaggtccaagtccatttatctgaacatgcgacgttattgacttgttatttaatcgcgcagttctccatgctagcattcatgtgagtccatcatcgaaaattgaaaccgatgaagatcagtttgagctcactgcacttggatgatcataggattcttgcaaagcagaaggccttagcggccctttccggtttactcttgccgattctcgcctttatcaaagtcgggttagtgccttatgtattggagtcacataatcggatgtcgaaactgataggtctttgtccatagattgactcgaatcgtcaaggcaagattcgccaggtgggcaaatctaaaggagatcagtgatccgcaaagtcactgaaatccccttccgatctctaggctacggagtcaggaagccgacgggatcgatgccatccgccgcgaggtgattgtcgccgacattgaggacgataatgtcgttatggaggagtctaagatttggcggattctggcccagccctgccgtttcctcgaccgctggttcacgctcaaggtagatactgccctggaccgttacttgacgagcgaaaaacagccgatcatgccggcgtgtccggcaccttcgcttggtggcgaacgtctaagtcagaagagccattcgggacaggaggttcaggtggttaggcaacacagctacaatccttactgggatgatctgccagcgccatctcgaatgcaaagctatacgcatcagccttggtatcacgatcccctggatacattcctgtggctgcctcgagatcccatgtctacactggacatggaagacacgattgagagtgagtcaagtccgcgtctttatgaaaagcctttgtcattgacgccaaaaaaatatgggtccagtgcgggcctgtatcacgacctctgaaactgatgtgaccgacatatgggaggatcacgtcgatatcgaaaagatgattgcctcagccgaggatcaacatcaagcgagacacttgtccaagattggtgtcgctgtcgacgatgattacgacatggccgatgacccagacgtcagcttggttgagcgcatcaatcatcgattacacaggataactcgtactgaacgcacgaccgcagacgacttgtcacaacatacaaacgtcgaggcttcagcttcagctggctctgccttgtcgcgtactccagcgctgcggaggaggaggacgcgcggaaagagcgctgcatcgcatcccggagggtccaacattttgcacgcagctcaagaggaagaacgagctgccgaacgcaaggcaaaggatcaagaagcgaaggaggcaaaggccgagaataaacggcaggaagattcgatgaacggcgtccggacttggaagagcttgtaccgaagtaatcgccgcagtgaggtcgtagctaatacggaatctggggtcgtttagtctgttaatctgtagtaataggtgccgtctgccgggctcacttttaatactgtatctagcatgattgctattctgatcagcttcgagatgaacgctacagccgagatgctggccgacattaggtctatcggccatctcgaaccagtaatagccaatttttgctgcggagtgtttgtttcgcccgtatcaagatcgtggccgggctcggcgttttctcctttttttacgcgtggcttcgctgcggacctctcctccttatccttttcctcgtgggcaaaggcccttggcgagggggggggtcgtgtgacagtgcttttgaacctcgtccgatagctgcgagtctaatcaaagcctttgttgctgacgacctactattcgttatcaagccggcgaccccgattccaatggtcagacgaccaggcgtctggagggcactgcggagatcgggatcggtagaagaccgcactgtcagcccagtgaaagccaatccaggtagttgcaattgtacaagacctgtagtctttagacacttggtctgccaacgaatagagatagagctggactgaggccgaccatccgccaaagttatgaccatcgatcatgctcattacccgagtcttgacgaatctgcgtacgactggcctcgacatctatggacgtagcttgaggtatacgagactggcttccaccgaccagggcgaaaaggatgattccgacgatgaagattcattctccccgactggtagttccagagaatctcccggcaacgccgctctctcgttcagctcaacgttggaatcgctctctagtaagctagaagacgggcgacctcaattctccgaaccgttcctccgtccgctacaaccggagggacgcggtctcgctcgtcgagtaagaatctggttgatacctctagtcggatgcgtccttctcgttaccatcatatcccatggcattgttaccagtgggaaagcagctggtcaggatggaacgtcggtcatcgttgccaattcgacggaagcaggttcgacaagtacctccgccaacgagacgttgatagatgatacacagaaaaagccatcgaaatcaaattcgagtatacctttgggcatatttcaggatggctcatggcagctcaataacgggacacatttggacgaagaacaccggacggtgactgacctactgggtttgacgtcgagtgtcgacctgaccggagccgaacaattcagtctatcaacccaggcttccgatctgtacatggtgatcgagccaaagcaacaaccggaacagccgaaaacgtacccagcactaagaccggtcgcaggtctgtctggaacccagctcgaatcttggttcttgtatggtatcatcgacaatggatggaccaagccgcgattaccgaaaacgcctagagtggacgtcgtcatgacatgggtcaacgggtccgacccgctctgggcattagagcgaagcaaaaaagtcgcaaagcatggattgaagttcaggatgccgggcatggcgaggcattggagagataacggtatgggcccttatccattgcgcagtattgtcgacgcctttgccgagccaaaggccgagagcgacctcagacggatccatctcgtcacagcggatatgcaactggatggcatcggcttcaatcggaacctggcggcgggtgaggaaagtcgtctaccctctattgctcaaaaaggaaagaaatggacgatcgggcaagttccctcctggctggatcagacgaaacttgtcccattgcttgacgaccgcccgtcgacggattcacggaatgtcgagttgcaatggcattttcattctcaggcctttcaaattcccgactcctttttccagcaatcgaccacggtgtccgacaagtccgagacaagcattcagtggaacgatgcggacgagtggaaacgcgatgcactacccacctataactcgtttgccattgaatggcaaatgggctggctcgagggagtcggggatataaggcaagccgctctttccgcatattaacggttgacatcaacgcttacgagggatgccatcattcagcgtgcacatgaacgatgacatgttgctcttggcccccctcaattcggctgatttctactcgataccgttcggctcggtcttgcgagtcgactctacctttcagctccgggtatctcctcagctggatcctagcaaggtgacggatactggcgagtggggcggcctgcagcacgcaaactacctcctcagccagcgatttccggaaaggcgcaggcattaccttcatcacctccccaagactctgagcaagcctatcatccacgaagccatgcacatgttcggtgaggcaatcgcagtcgcgtccagcaggccgttcagggaggtcaacatcggtaatggagatatcgagatggggtttttggtgacccacttgagaatcgaaaggtggagggaagccttgctatggacctgggcggtcggaaagatgggtaatcttactcctgacgagacaagcatatggggcgatgccgcgagggcagaacttcggtccgttctcgaattggatgatctggacggatcagcgactgttgtcaaacaagagagagacaccctgaaggatgtggagtcggtcttccggaaaggagcttgggatcagcccaagtccacaagctattcattttcttcgatggatgggactctgccggagatacagttatacgcgagggaaggcccggagacgtgcataatcgacctaaaacgatgcttgggagaggcattcgtcaacggaacgcaagatctgcccgcatcggaactgttcaagcatctcgctttcgaggattggaagtgcggggattgctgtgagtttgaagtcgttttgcggaatcaacgtgagactgattgatgtcccatacaaatgcgtcagtgatcaatgcgcttgtcaacaagtctggcaagagcggcttgtctgccttcttccccgacaaagatctcgtcgttcgcaacgccactgtcaatttcgaagtggcccacctacccttgacgcccaattggcgggctacggatttcagcctcgaaagcattacgcaaggagatgacgcgccgtttgatttggatctccagatgtggagcatgaagatgctatctcgatacctttatgtgactggtaagcttctcatgatcaatggcgacgtgacatttctttgtttaaatcacaatattccatgcgtcccaggcgatactccgtctcgctttgccaccctcaaccaagcgactcagacaaatagagtaatagcacagcttgacgcggactcctctgttgcgatggtctgctttaatgacgacgcaaggaagaatcaagaggagagaatatcgaacgtcatacatgaatggctggataagaaattcgagggcaaggacatgtactgggagaaaccccagcaggagtagctacgccgtcgccaggagacatataccccactgtagcgaatagtccatatgaattagaaatcgcagctcgcaagccctgggcggcgggcacaatccggtcgtgtctgacgccggaagtaaatccggttatcgatctgcatccgatcattacgcctgatcgtaccttgtacccggctgatcaccttacgctcacaagtataaagatcaaagatggatcacatgatgtatgatgttcgatgtccgagactgacctgcctcttttgcacgcactgactcgccccaattttgagactcgcctcaatttcgaatttcgaggaacatgtggtggccattcgatctacagcagcgcaagcagctcagttcccgagctgctactcacgtcgcagctagaaacgcggctctggcattcgagctcaagggcaagcaggccgatgctagcctcgataaagagatattgtccagtgatatcgctggaatcgtgtacggaatccaggaaaaggaatggacctccctgcaagttctgtgtgccttcatcaggagggccaagcaggcccaggagatgaccaattgcttgaccgaaggtgagtcggtttgcgagtcgggtccgcgcgtcagtccgaaactgaccgcttcctgatacgtcggcccttagtgatgttcgaggaggctatcgagagagcgaaagagctggaccgctattttgaaaagactggagagctcgtcgggcccttccatggtgtaccgatcagccttaaggaacaattcaaggtgaaaggttgcccgacgactctcggcttttcttcgtggttggacagacccgttatcgaccaagatggtaccctcacggtcgtcgcaaagcatctaggtgctgtgccttttgtgaagacgaatatacctcaaaccatgctggcattcgaatgcaacaacccgctgtggggacgcaccaccaacccgtacaattctgcttatacctctggtggatcatcgggaggggaagctgctcttttggcctgcggaggtacagtaatcagcttgggatcagacatcggagggagtctccgtattcctgctggatactgcggcctctactcgctgaagaccacggcgaagcggtggccaaatgaagggtcggtgaaattcgctcaaggattcgagggtgtggtctccgtctacggaccgatggcgaggacagcacaggatctcgagctagtctttacgcagttcacaaacacactccgtcttagcggggatcatagcgatgtcgagacgatgggcgaggacaatccggcgcgccatttgaaacttcgagacgagctagactctatcgggttcatgacccagcctgtagatgctggttggttcgcacctctagaggtcgtaaagaagaggaagcggccgttgagaatcggctatgttctcgcggacggattcgtcgagacctctcccgcttcgtacagggcggtcatggagtctgtagaagcgttgaagaagaagtatcctatagaacaggtcgagctaaagaggctgtatcttcctgacgatctgggcggggtcgaagcgatcaggatcttccttggcatgaccagtgcggacggatacgatcgtctcaccgatcctcatctaggcaaggacaaggctgatccgaccctgacgttgcccttgctttcggcgcgtctaccaaagatattgcgggccatcctcgcctttgtggcagcacacattctgaaggattggatgatggcgctcatcctgaaagctgccggtagaaagtcggcgggcaattatttcggatggatcgtcaagcgagacgagtttagggaagcctggaagcgtcgagtctggtccgcagagaacctggatgccatcatttagtgcgtataataggttcgaggaagtatgaggtgtagagctgatgcacctgcacctgcacctgcacctctacgacagccccgtacaggcgtctcctcctatcccacacggagcaggagccaaagtgtcgatgatttgcgctgcgactgtcatcttcaacgtgctcgagtatccggtcgcctgcgttccagtgactcgagttgatgctagcaaggactcgcacatcaacggagatggtccagactggaaacgttggcgagaagatcaggacgttcaccgtggtagctggatgatttcgaaagctctctacggacaggggatctatgatgccgagaagatgcaaggtcttccagtcggcgtacaagtggtcagtgggctcagggcgatcagacgtgcttttgaactcatgctgatggctgcggcgggacaggtcaccaaaccattccaggaggaaaaagcgatcggcatcatgaagatgctcgattcggccttgcccccgcgctcacagcgaggcggagtcagggatctgacgatcagtagtcggcaaaagtgaaaacgacgccaccctcgtccggcttgactatcactcctcggaacgaagcggctcagatcatggcacggaaggaactgttggaagtcatcgcccgttcgaagaagcgcgttcagggcacagactgaaaccccagaataaacacctcctttgttccctgaaagtaggaggcgaagatcctctcgttgtatataagggagacatgaagaccgttttcgaaacgttcacgtctgcactttgcttgttgtgcattgcgattgttaccccctttcccgccccacacacggtaccgtatagtatcgacaaccagaaactgtcagacatgcccgtagaatccggtcgagaaacctccgctccaatcaaaccccgagtgcctatccttatggacaacggcgaggtcaaccccaacatccacggcaggccatttcatagaggccgaccgcctcggaacggcgatggtcagagacgacgagttacctatgcgagcgccgatactttctgggggcgatacaccgggatggtcgtcctcgaggttagcgagtctaaaaccgcggcgtcgaccgccagaggatcagcacctaccgctcagaacagggtggggctcacgtttgccaaacgaaagagacgaaggcccaagcgtagcaagaggtccgggacgggagggtcggatgatgagatggatgaagatgaactgacactcagcccacttgggttggaggaatctagatggctggcgatgtaatttcgacgatcatcctcgattgccttttggctttcttacattcgatacactgagatgcccatatgaccctctctctttatctctcgtacactagtccacagccgttgaagcgggcgtatcgtttggtcctttgtaattacatccccctttcccatgtcgcctgctgtctcggaccgtcttcccggtcggccaagcaagggtatcttacttggtcccatatcggcgtcgttcgcaaccgctcacttggccggtttctccgactcgttgagctccaacaactcctgctcggtcatctccctataaggcgtctgcgccctcctcctcgtctttttccccgatccgacagtcccgaccgacccggcgctgaactcggggacgggcgtcgtagcttcctctacgtcgttcacggccttttccaagggacccgagggattctcggattgacttgcgaggtattgagcgcgtttctttgcggcggaacgttcggcgtaaaaccggccggcctggtggtcaagggtgaaagtgcagttcggtctgtcagaccgggtttctctctcctgcgaaacgtcgaaaaaggtactcgcctgtaaacaaatgacccctgtgaggaggaccgagatggtcaggttggtccctgccagccttcgaaccgaattttcgagcgtctggtattccctagaaccgggcgtgtatggagtgacgggcgaggacgcaggggaggacaggtgaagaaccgctagagacgcaaagacatggggcgagattcagctgcgatcgagctagatccatttcaccgagaggctcacctgggaatacgtcggatacctgggtgaccgtgacccgaaccaagagtactatgatatgcagatgacgacgtcgacgatcaatcttccgaccgctccatggtgtacgaatctgcaggcggaccacgtacgacagcaagccgcgtcaaacaagtaccccccgttgaatctctcgccttttgagctcgtcaaccccctgattgccctccaagccattgtccccgcggcgatgcacccgatgaccagccatatataaggtagtggggtgtatcggacggatccgagcagggtgtaataccggaccgctcgagagacggcctcttccgtggtagggttcgtccacagggtattatgatcagctatccagtgatgaaaggtcgaacctatgtgtgcgtgtcaacgagcgggatcgaggtaagtgcaatgtgcatgggcaacgaggcggggggttcgggcgtggttccgacttgcctgccaagaagcaagtgcaacatgttacgaggagtgtctgccagcccatttcgactggtatatgcgggacagaagacgggcgagaaagatgtgggatcgtatgcgagctgtaatccgagtcgaagctgtatgattccaaggtgatatgatagatacagttagtatgcatgagaccaactcgatcgtctcgacctcctcgactgcgagcggaagtaatttctcggggagcgactcggagcgggacaggtccaggtccaggtcatatgcaggtagcattcaactatccattcatgcatcaactcataggcaatcttcgaggtatacaccagcttgcactcggattcgaataacctggtcaagagcaaaactcgatgatcatcgagcagagataaaagcaggacccgctacgacacacgaccccatcaacaacctatatttcagctcgcgcgacagctgagaacccggttagatcatggtcaggcttttcgagcaacagtttccttacgagtgagtactgtgatccgccacgacctagaacctccattgtcaattcgtcaactgactcgccacttgtgacgacaatcttccttagccactcgtggtcgacgacgacgatcggattatggctgaaatatcccaacccgtactctccacacgtcctctcaatcgacgtcctgtcgaggtccgtcaacgcggacacaggtgtgctcaggacagaacgattgataggtgtcaaacaggccattcctgtaggtctctcgagggttcctgtagcttctgcctcgagtccattcaaaggctgatcaacgtgtttcttggtgacgcttcccttttgttcggaattcaccttggtcgtccgacagagatggatcatgcgagtgagtatcgcggaatggtcatcgaacggtgcaccttgctaagcctgcctgtctccgcagttactcggtgttgtcgaagaggcctttattcgggaagtcatctacgtcgaccccatcaatcagatcacaagcatggcctccatcaacctctcgttgtcgcaatacatgtgagtcgtatccatcgactggcatcaaccagcgatcacatttctcgtgactgaccctcgtcactctcttgccaggcaaatcgtcgagatgatctcatacaccccggctacgagctcgccgaccactcagaccctcttctcgcaacgagcccacatctcttccccacctaccggttacccaccttacgccgcgacgaccggggatggccaaccgctctcgaacgggatgaccaaggtcctcaaacgcgtcggccccaaattggagagcgggagcgcggataggtttggcgagaatgcggaaaagggacgattagggtttacgggggtcttggatgagctggcgaagaggctcgaagagaagaaggcgctggccgagtagcgggagcggggtgcagacaggcctttttcgacaccggcatccgcagagggacgtttagataacagacagacacagaagatgggggagggactatctgcgccctccagaccatcgacagagaagacttttcaacacttggacgacacgcaatccggacccagggcgattcaagcttgcgtcccgggcttggataacatcacgactcatgacgacccccctttgaccctcataccccgccccaccctcgaccgtctatcgcacgcacgacccgacccgccgtgcttcgacgaccggatccgcaaacgctgttcttcgtcgccataaggccaagcagctggacacggttctagctagagcgacaaagatcagagtgacgatacgctcggcagaggctcgctgggacaaaaaaaaagaaggagaggagcggtgcaagacgagacgacgacgtcttttgcattccgctctttcttctcatcatcggttgtaaagcagaaattcaacaggttcgatccatccatcatcgttgtcagcatgtaattatgtagtagattctccatacaattgtctacaaactatcctcgatatagctcggaaggttcatatcccacttggagtggttgtatcaaagagcatccttctaaaagtccctaggagccactcaagatcggcctatccaccgagaacacctctcttgacgatataatttacacagaagaagagattcagcttgtggcaatgcaaggacgtgtaggatttgatgatatgctttcgagtttccgttagcgcgtagaaagttgaagaagcgacttgcggcttgcggaccgaaatgttgcacctttgacatacatcgagaacaaccttatcccaaccacgactagtagctcgagacgcggtcatctgcagctgattccatgtgctagagagaccctaacgaaatgtcggatcaagctcaggaagagttcgttggctgtggggacctgtttggcgatgaggggcatcttccggaagtgaccgagatcaggtatggacctgtccggtccgtcatcgtgagtcctactgtcccgctcgaatgtaccaaaccgactggtcgtagaaaggaggatacgtcgatcggtgctgatatgcatgaacctcggtgatagtagcccgaagcggtggggaaggcgttcactcagctagcttctcagatctttaacagtgggctggtaagtcttgacccgcccaccatcgccgacttttgtgcgacgatacatcgcgaagaatactcgaagggctggctgttgacggatggtccgacttgcctcttacggaacatgtggctatgataggtcatgaccgagatgatcgaactagggagggtcccgttcgaagggaaacgaagtacgttctctcttcctctccgtcgacaaggctatgggacactgacttgggcatggtctcgatggtctactatagtactggagatcggagcatcgacctctttcccgacgttactagcgagcacgtcggagcaccctccagagagcatcttgaccacggatttccccgacgaggcattgatcaagtgagcgctcgtccatctccgccatatgttacgtctggggcactgaagaaggcgaaatccttcctagaaatctgcaggggaaccttgatctcaacaagtctctggctagatgcccggtgagttctggtgtaatggaaggtctaagcgctgcgatagggttcgcgctgaccatgttgtgtctcccatgcaggtacgatgtatgccatacttgtggggagctgatgtcggaccattactgtacgttatcctcctcgaccttccccttcatacgttcttagtttgccatgctgacgatcaacttgactttatgtaccagggcgactctccccgaaccggagaagaaattcaacctcctgatctctgcagacaacctctggctacatgacgaacacgacaacctgctccacaccctgaatacttccctgtccgaggacggcatggcgttcttcacgaccgggcattacgctcgaagacccgccgtcgagacctttttcaaacgggtcgaagcgctaggtttcgaggtcgaggagctgcattacggggacaagtgggaggggaagatggaggtggatttggggcctgggagactaagggaggatctggatctgaaaaaggctgcagtgtgggtgtacaaggcgtgtagacgggtggagcggtcgtgatgtttcaagatatcaatgtcaatagttagagattacacgtcataatagagttgacgtagtagactgttgcaccaatctttacgtagcttgattaatttgataagccaggttcaatcacgtaaaacggggggctagtcgcttgaaaagtaaacaatcacaaggtcaacaatcaactcaaggacgtacacatgagtgtcgcgggtctaccaagtatggatgattcgaggtcgacgaacagggcatcacttcacggaaacatacaatcgagcctgtgacatatactcagttcgcttcaaagaattgatcaccccgtcaaccttcctgaaccgctcgacgtcgacagctgacgataacggcctctcatggcggaaactcacgatgaagggatgccgatcgacgatggcctgacaccgacgaccctcgagggcgtgacggccaagacaaagaaagactttggagaactcctgtgagcacgatccatcagacctatgaatcacttcgatctgatcgtgcgtgatcgacttgcaggcagagctttgatcggctcaaaccattgatcgacccggaaggtgatttcaaaatcatctacgccgcggaagacatcctgcagaaacaacaagcttcccgagaataccagatccgtcagaacaacgccgaattggcttgtgagtcggacctttgctttgcttccacttgtgaacgagaagaacttgacgaccgggcgtgtcacgcggtgatagccctggaacggactcttctcgatgctaggcaggcggcgagacggccagctaccgcagggacggaagcggagcatgaagacgccctttccaagctcgtcgaagacgtctacgccggttcgaaacgcaagcagacgcaggaagatctcttgaccaagaaacaggccttgatcaagttgagcgaagaggagtgcacaaaggcgaacgaatggaacgtggagaaagagatctttacggataacagcaagccgtgagtcgatcttgtcctgtcgcttctggcttgaacaaaagaaggcgaatcgcttaccgctctctactccagtcgccggctaaaggcattcgaagagatcgggttgcgtctgctggataacgaggcggaagggatcttcgtctgcaagtccccagatcgatcgttccctcgctctccacgacttgtccgctgaccttttgtttcgcttcccgtcatcaccgccaccgcagcgacgcgaaccgacgtcgatctgatcaagctggacaaggatcagtccgatttctacaagacgacaacgatctggaacaagatcggcgccatcctgtaaagcccggggaaggttgtatccacagcgtatcgggacgaccggaccttttcacttgtatcgatatcgaggttgtatgattccgcgcgacaaagacgaatcgactatcccaaacggcatccaaggccatacgtttcgcgtttcgcctatgccccttcaaatgtctcattcctgacaagcttacagtcgccaccggcctagacactggcgaaacacttactacaatcccacaaacattgaaacgtagctcactggcactgacagtgcaacgtgccgaaccttgtcaagcgaaacttgtgtcactcccattattatgattctcagctggcagctctagtatgtaaccacctccttcatctcattcaatatccatcgttagagcgacgtatttctggtgtagggcgttcctactgaacactacatggtgcgacaccgacatggctaaggacgaggctctgttcgatcacttgtcgaagttgcaaacaattgccgcaatgaaccgaagcacgagcggtttttcatttggacatacgaagcgtgccgtctagtcggtttgcctcctttacgactttagaaggatcatacatgagaaacacgtttaaagctctcccgctgtccaacacactatgctggactaacatgttgaacagaggaataaatgtccctatcaccttcaatatggacgagcagttgttgcaagtctactgctttgccaaacatggatcatatccaaagtgagtttgtgggttatattgggtgtcttgcgtgatttgttagacactaatgaaactcaagctcaaggacggataaagtattgcgcatggccataaatgcacattgggaaggcccaggtcagaacggtagcagctcatctaagccacgggactctcgacgacacgagctcgatgttcaccgtcctgtcggggattttgtgtttctcggctcgaaagaggcagcattgatccatagaaagatgcctggccagttcacgttctgtctacgtctcagcgggctgtagaccgcggctgtgcgtcatcctcgagtccttttcaagccgttgaaatgcttcccagcgttccagactgcgccggccagtagtcttgcagcgcaatcgaattggttgtacgggtcatctgaccgactgatcgtacaaactgtaggataacccccgccgcatatgctatgaatatggatgtatcgaccgtttattcaactcgatcctaggtctatgattctagcttttcgacgtatgcgccccgctcgtctatactcaacaattcccaagcgacgtccacaccgtgctccgcaaagatctgtttgatcttcctagcaatatcctgagaaattggacccgattgatcagccaggaagtaaataacagcgatatgacggtaatagctagagcatggtccggtgactcacgtcaaagtcgtgcgtggccagagccaagattgtgggtccagctccagagagacagatcccaaggagaccatcatgcgtctgaggcgtcaatgaagccaagatctcgggaagaccagggatctgatatcgacattgtcatcggggttatcatcagcgagatggatctgtgagtattgttgcctcatctgggagggcgggtggacttaccaaggccattcgatagggttggtggattctgtccttcatggcttcgtagatgagttctgggtcaggaggtgatcgcgaaagggcggtggtgaggacggccagtcgttggaggttgaatacctggtttcacatccaacaagcacgagcatcagcttcatccagttttgttgtgcgattagtgcgagcaagtagactgaccaaatctttccgagaatacgattctggcaagacccctcgtgccttggccgtggcgagttcgaattgaggcatgacggcgacggccttgatctcgggtgcccagccgaaacgcacatagtgaccgatcccacgaggaggtttaggcgggtcctgtccccagttctctccggcatcggggggatattccggcaagacctctgccaggggaatctgagcggcgttggtctcttcgggtgagagttccttgaggtacgaccccacgaacccgccgatgagggctgcggtgacattatccgggtgtctctcgaccatgagggcgaaatccagcaagcgtgatttatcgagtttcaagttacccaacagatcacccagcaagactccggcgatgactgcggcacctgatgagccgagtccacggccaaaggggatctggttgttggccaagatgtgcacgcccgagggaaaggtcggaatgtcattgcatcgcaagacgtagagcgcgactcgggtgagcaaattcttgtatggagagagcggtacgttttcactgtcgagtccggtgtactcgatgaccgggagcgagtgttcggccggtttttgcttggggatggatacggtgagcttgagggagaggttgagggcgataccggcgacatcgaagcccggtccgacgttggcggtggtcgccgggacaccgatgaggtatttatcgtattcaacagacatgaccgtagacgaggagctggtatgatcgaatcagcctagggcgcagagtagctctgtatgaaccttctaaaagttgaatgactcgagttgacctttcgatacgatgagcagctaggtcgagtctctggaacggaaccaaaatctcgagatgacctctcttcggacccgaacatcagacaccaaaactgacaggccatcacttcacgtcatagaatatgctgaatcgatcgggccggcgagggccagtgcgctgcggtctgatttggcctgaagaggctcccgtaatgaggaccagccaagactttgagtggccaccacgggcttgggtgatatagatcgatacaacagctcgaacatcgccatgatcgtacacgggttcgaggcgtacacgaggatacaaggaacggaaacgaggtcgtccgaggagacggccgaatgtactagtgttcgacggcgtaatggcgtcacgggtgttgaagagaaaatcgaaagaggcaagaggatgacctcgtatgaacaatgtcgagcgatactagaagccgaaagccaactgtgatctcgtgaatacgggtctggcctccacacaaagcgtcagcctgagcaacttcccgcttccacaagaccaacatgacgacgtacggtttccacttcaagagctctgaacgtaacgtatgtcggttcttcttcttggtgacttcgtattggctgataacggcgtctgtcaagttgatgatgtaaccgttcttgtattgcttgatcatgtgcaaggcttgacacctacgcacggtaatacacaagaggcaaggagagggtcgtcagtcagtataacccccaaagttcctgctccctacccgctcgccgactcacgtatgcataacgtcggccggcgtgatgcacgtcttgttggcaatctcctcgatactgatctcctccttggtatccaacaacatgcccacgatgacctcggcccagtaggctcgataactcaacaacccgagatcactgagcggtttctccggactgccgtgtttcttctcgaccttgctcaactcgtacgagaattcgatgagtaatttcccgtacgatttcctctgatgttgtggtagcgtgaggatacaggctacattgtatccgtcggcggattccttttccttggagaaatacccgaggaggtgacacccgttctcgtccctcgagaccatgcaatagaacaagaacggatcgacgtcgtagtagagcgtcttgtggtcgaggaagcatttcgagagcagcgacaggttcctacaccacgtcctctgtctcctcccgtcaatctcgaaaaagctgaccttttcgtcccggtaaatctcgttgcccggaggatgccggagttgacatttcgtcaagtgtcgtttgagcatgagcggagcggggtaaaaggagaggcagtactcgcaaatgtagagaatgtcgatatgggcgtattcgatagggtaaggggaaaagtaccaggattcgacgcggtgtttccccatctggatggacttcaagttcttgacccgggagacttccgagtgttgttgcgtcatcgaacccgaggttcggagacgtcggatctcgtcgtccttggatagcgtttgcgtggccaacgggttcgagggggcagcgacatcaccgtcttccccggtgacggctcgttcggcgggtttgggcttgttcgacgttgcgtccatgtcgacgtcggcctccgggtcgtgttcccgcccatcctcgtcgtcgtcttcgccttcagcgtcatcatcgctgctccccgatccgtcctcgtcctcgtcatcgacgtccatcttgtccgcacccccggtagtctcgtttgatttccctgaagagacgctcttctgcgccgccgttgccgccgccccacctcttgccgacgtcgaaccggactgggtctttctggattccttgccctttctcgccaagggtccaccttgcgcacggacgctcttcatcccgacgacctttctcaaactagccgggctacccgcagctgcggccgtagcatttccctgtttgttattctctcccttcctcccagcgaccgacccgggcgtctttttctgagcggaagcggcattaccaccaccaccggcggcagtgggttccttttccttttccctctccctctccttttccccggcgctcttcggccattccaattccctctcgaggaccaacctggaccctccaacccactcgtcgagtcgcttgttgaactcggtataatgcacgtaatactcgacctcgtccaattcgtcgtcggtggcctttttcgggttgtaaagggatcgcggtttaggtctcgtcgagaggatctcggcccatctttcttcagcctctccgttggctgcgggcttgcggacaaagatcttgaccccgatgaccacatcctgacggaccgggccggacgacgaacaggttcttggttagcttcgaagaaagaaggaaatcccgggtggataccacgctagggttcatgaggttttgtttgactcacctcgatcttgtatcgacctccctcgactttgcctgcctttccggggctctcgggggggaccgagcttgccgcccgtttaggcgtcacaggggtagccgtgggcatcccaacaagtccgagaacagactagactggaaagtctgtcgaccgaaaacaggtgtggatagacagggtagattgtcgattcgattcggaggcgagtccaggttccggatcggtccagactcgtagttgaggacgctcgccactgcacgctgctcgtccgacgacggttccgaggcggtgttatgcccgcgatgggggggatgtcgatcacgagcgtcaagctggaccgttccggaccgcgatacctcgcccgggtagatgcttcgaatttggtactttcgatgccggattgaaggttgtggatgtaggatcctgacgttgctctgtgatcgaatcaagtcgttgttgtatagacaactagtactacatgtcatgactgtcggatccgtgggcagttttccaatttccggtgtttacgtaatcacacactggggggatcaacctcaaccagggaaatgttcatctcgactcgatagtctgggttgcatggtcgttgctactcagctggaccttatccgatacatagcagtcagacattttagcatctaatcgactcggctgtatttcgttcagttactgagcctacttttcgacggaaaaaagctcgcatcgcggagctcgacctcgatctcggttctccaaagcacctctgttggcttctcgtaccgacatggaacccccatggctacccacacctcttctcggttcgaaacgaaagacgacagattcttctccctctcctcgcaaagacgaccatcccaacaacacgggcagttcgtccggatcgaaaaagctcaagttgaacgatgacaagagcgatgccgccgatcaagatgacctggatgaacgggagagggaggccatcatgctcgccgatgggttcgaaaagaccatgtcgagggatgaaaagaggaggatgaaaaaggagaacgccaaggccgctcaaaaggcagtgagtcgtcgcgattcaccgggtcgtttgcgttccaggacgaccatgtctgagatttcaccgggtgtgggttccgtagaagaaaccaccgacactcaattacgctacggcggggttcaggagcggaaagaatatcaccatcgctgtaagtagggagagggtatcgtttcggcgttttcatcgtttcctattcccgcacaaagtagggtccgccgagacttacagaccatttcctttttccgccttggcacagtccgtacgagatctcgtcgagcatctcgtcactggcagcatccctgagcccaactggatgaaggtcgaggtgagcacccttacatacgtttgtagtgccgccacatagatcgcggctcatcagctcgactcggcctcgtcgacctggacggcggagaaacagaatcgtagcagcgtcgaacacgtcgtcaccctcttcatccccggcctactccccacccatctcggattatcggaaaccaccctcaaaccctctcaactcctcccctttcccctgtcgatagctcaccttctgattccttcatcgactgcatcgagcttgtccttataaccgatttctgtgagtagggttcgctgatctttcggcaaagtgagcatgttcatccgacgcgcatggttggctgatagctagatggagtaaggaagagcagaggatagtatggcatggttatcatccgattcgatttagcaaccggttcagtggtatggatctgagcatcccacagccttacatggtattgcgcgtagccgtcgaaagactctagcgtctcacgaaagtattgcagttcgagctcatggttcgttgcagccatgtctacctactcagtgttataatcgaggcttgtcaagtggatgttatcagagagacaaggccttgagactgtcaagccctaagaacgtatttcgccagagccgattatggttaacctggagatgacgcagcagcagaaaggtcaggtcggcttggttctgtttacaaagtgaccgacgacgaggtagagtgagtagatggatagccagaagcggacatgaaaatcaggttctactagtacttggatacacggtcatgtccgtgtttacccaattacccaccaccaccacaacgtcaacaaacaacgtcaacaaacatagaccaatctcacacttatcggcgtcaaacaccatctgaacaacttgcttgccgataaaccgaattgaacatcgaacagaggctagagtaaagcacaagaaatccgccatcaagatgccacctccgggccgtgcgcaacaacaacgcgtcgtcgaaccgtcgatgccgttcactccctggcctccacaggaaatcgtcaacttttactatggaggtctcaatatcgactgctcccaggaggatatcgtcaaaccgactcagacctttgtcatgcagttttatggcaagatattggaggatgcctggaagatcacgagcgagagcgcggcagagcaccgaatggtgtatctgaacatgttagcatacggcaaggtacatttgggcaggccggtatgacaaggcgatgtacgcgttgggcactgatgggaatggttttcgggattctgcaaaccacaggagttgtacgacgaacccctcaagtttgcaatgttcttcaagcacctgtgagttggcttctcgcggatatctaaacctcgaacacgcttatcaaagaggaccgccaatgattttgaaatcgcagccgagatctagcgttcctgtgtggagtaccttctttcagtcacgccgacctactacgacccgaaccaatccgattccggtctatcgtcacggctatcgccaattttctcaaattcaggtaagctcaagagatgaagacgactcgatctccgccgagagtttcatctgacatatattttggttacaggacgtcgaacggggagtacttcgatcagcaggtagaaagactggacactcaacgagagaggtgagtcttatcgaacatccggcaccatccccttgccacaactaaagctcatgacggctcctaatctgtaagtatcgttcggctagaagaggagctggcggcggtccgagcagagatcgagcaaatcaagtaagcgacccactagcaagttcgaatccggggctaggacctcgaagctcactccgaatctacctacgatgctcagtgagaagaacgaggagaatgctccgtttgtcacggaagcgcgacaccgtaacgaggcgttagaggcggaaaattcgaacctccgtgtcgagagcggtaaagtatacgatacggctgccgcgctcaaagtcgagcgttccggtatcgtcgccgaagttcaaaacaaggtcgaccaagtggtctcgcttcaagacggaaacgagcggattcggatgcggattgtcaaaagccccgaaaagctcaagagaaacttggaggacatgaccaagcagcaggccgaattgaggacaaaccttcgggactgttcgagaaagggcagagaattagccacacgtctcgatgtcatggcggggctggaattggtgagtccggcaacagaaccgtgaggaaaacagcacgccaacgcattgtaacacttgacctctcaggacctgaaaggtctaattgatcttgcacaaggcatcgaagcggacaagaaaaagctatccgacctgaagatgtacctccagcggacttcgaatgtcttgggagagcgcgatatcgagaacaatgctgctattagcaagattgaggtgcggagaatccgataagaccctcaacgcaacgaatcgtacactgacaaagatcctgttttctcatatacaaagcaacttgagcgtcagatcaaattggccaacgaaaaattggccagacaggtacaaagcggcgaggagatgcgacagcaagccaaggaagagatggaccagctcaaggcagagtcagtcctggaattcgagctcggtcactgatagctctacctgactggggatctggtctttcgtttcgcctcgacacaggtacgcagccaaagccaaagataggacggtcacgttacgggaggtggagagccgtcgcggcgacaagaagacgatcgaggacgagatgcgcaggttcagagaggagcagaggaagcaactcgacacgctcctggccgagtatcagggtgtgcgagacgcaatgggtgagttggttttacgatttccaatcgttacggtttattgattccggacgtgtttggcccacagaggactacatgtacaacatcggaagcaggctcgggttgaacgcggtcgcctgagcgcgggccagtagagtttcggtcacgcctgtgcctttttgattttgaatcatgtatcgattgttatactagtcgaattgtacaatactacactttgataacgataccagagttttgccgcacaggatctccgggttcgccatgcggcaacccctcccctgtcgctcactgtgttcggacgctacagcgccgatatcaagagaaacaggcacgagctccgcctccatgtgccttcaggccccgttacttccccgctttgtcagggaacgggtcctgccttgcccagtccgatgtatatctgctaggcttgccgtcgaaatggcttcaaggctatgctgtcccgcctacaaggccgtcgctcgcccagccaagtcgcgccgaacttgtcgactcttcgtcacatccaaggagaatcaagccatgacttggggttagggtataaatatacgccaggctgcagagcgagaaccgcaacccagagcgttcaacaagccagcgagtcttcccctagcagtttgagcatctcctccacgatacgcgcgctcgtcccaatgatctgactgaagcactcgggcctccggacgcttctggatagctacgctcctcctggacgccaaccaatctgacacccactagcctgacaggatgggaactcgggtcaagcgtgactacaactccgccgcgagccgtaactctaccgcctcactccgtggaagagacggtcggggtccatgccatgcaatcgccgttggttctcagcgcccccgctaagtcaagcgggtttgaatggttggttccggaggggtccatctttcacgcccaaggtcgacatgctccatttggccaagatcaggtacgatgtacgaccggacggtatcttcgatgcctggaagggcaagatggcctgcgaccgaactgagaaggatcttcgtctgtcccccttggaagcgctgcgtattagatacccaggcacagatagtctggcacgactcgagtcgaatttcggactgccaatttacgttcccgcttgtggggttacgtaaacggggatttgactgagtgagatgaagccctagacagcatgaccccagcccaagctctcatcggaagggaaaggctggcgcggcatgtttcgacgctcgcggtatcattcttgatctgcaacagcgagcgagagcggcacagctcaaggggactaagctgatcaaatgcactgaccttgccctggtagcgtgacgtcggcattctcagactttccacgtctacccactcatccatacgtccatacggtagtttccctcggaacctcctgcttcaagctgatgtacgcctcttcagtctcctcattcaggtcatcgtgggcaaagcagagccgaaccgcatctacgtcattctctcctcgtccgggtggacttccgagctcccgtaccggggtcttgccggggcgatctcacccggtcggctcgcagcaaggaaagattacgacttttggtttgctgggacagggggtcacccgcaagcaggcggaggacgaccgatcgatcaggtcgtgggtaccccaccaatcgcatccttcaccctctggtattctgggccagctttgaggagtgtctctcccgcgttccggtcagggtcatgagcgtgctgaaaagcaacctccatcactgcctgatagctgagactagaggagatgctccagcctacggctatcggggatggcaggtgctgtcatgactcgactttcgggagattcatccggagtgtgaaaggcccagaggggagtaagatgcaaaccgatggaccaaacatttagaccacggccgtccgatgggtaaatactgtatcaaggcccagacaggtggtcagagacgcgaagcagtcgcacaacaacgacccaacataccttagggttaggtgataccccacaaacggggacagtttcgacacggttctgccgactgcccacgaatgattttgatctgaggtctttggagactggatcgttgcccttggacaaaacgatccgagacgaacacccgctcggaacgatcactggaaggaggaacacgtcgcggtgaacacgtagatgagccaacggatctcgacggtatggcgatccaagggcgacgtggtgtcgccaaagagaactgcttggattacgctactccgagaataggttgaacgtgcgacacagtgggcgtagattggacctgtactgggcctgctagacagttacagaggttttgattccaatcgcaaagggaggagcaggttgacgcatttacttccgcgactcaattcaattacttccgatctggctcatcttgcgcttgtggtcttgcgacatcgaatgcgctgcatagaaagagtaggccagtagtaatgctcatgaaaatagaaaagagtcacaaggaatgtggaaattgcttggctacatggctcttcggatagataataccctcacaacgtcttcctcttctctgcggcgactcgggctgttccgagtagttccgaatagtgtccactgctctcagccatgctctgcgtgagaggtgacaaagtgagggtccgtacgtcagcgacatcgaaacgcactggtgaacgatgtgattgatggactcactcggaatacagcatctttcgagctatctttgctgagcagctcaagtggcgatccaatctcgatcatctttccctcggacaagacgatcaaccgatcgacgtcgataatggtcgaaagtctatgagcgatggtgatgacacacgagtcggcaaacacttctttcatgcaggtttggatggcttcgtcgctgttttaatcgtcaagatggacagtccgttaatgcgagcagtgtcttgagcatgagcgtgtggataacatacgtctgagtgtccaacgatgcggaacattcatcggcgatgaccactatcgaacccaggttgatcagctataacttgcaagactgctcagactcgaccactcacgattcgaccttcgaagcaaggcacgcgctagcgcaagcagctgcctctgtcctgcagagacggatgatccaccttgagatatctgggtatccaggccaatcttgcccttcgaggtggtcgcccttgcagtgacatcgctgtcctggagggtggccatgcttggaacacggcttggggttctgctatctgaaggagtgtgtcctactggacccccgagctggactttatccatgacctcaaggagctcttcgtctgtatgtcgctggaacggatccaggttttctcgcacagtaccttcgtgagcgagcaggaagtagaaatgcgtggagatatgatatggtaagcctgcaagacgcgcccctattgtcttagactacccggcttacctgtgaacaagaacgcctcttgggggatgtaggatatcctacttctaaggtcgtcaactgcacgcccacatttcgaacgtctcagcgagattcggtcaaggctatttggcaaaacgtaccgccaatactacagatatctatgccatcaagcagaatctttcctttgcttggatccacaaagcgtaataaagcttaccggtgggcggttcttagtaaccaggcaactaattagtcgactccccagactcaccagttgacagtgtcgacttcccggacccggtacggccaacgattccgatcttctccttcgccttgatcgaaaagctcaagtcccgtaataccgccggcaactctggcgcgtagcggatggtcaaatccttgacctctaagaatggaactgcattgttcgatagcgacggccagtatgctggaggtctatggccttcgatgattgaaggtggctcttgtggaagttcgaggaactcttgcgcgcgctcaaccgagttgaaatcttgctctctggagcgcagagagaacaatgtatcaatgaaccgcgttgatcagcgaccgcagaatctgttacgaacagggagccccagaacctcgacagccagtatacgcccataaccagcgattgactcgatgtgatagctaccccagcagaaccagcactgactgcgccgctgagcgacaagacagttgtaaggaaaacggaaagctgtggacaaagtcagacccgcgtatgtatttcaagagcagatcactcaccgctccgagagcatcaaaccgatatagcagccagcgattgcctgtaaacatccggtaactcataagctttgtaacgaccggggcgatggttatgatgttcgaggtgcgtacacatccacagatctgcaaccagagagtctggttagcctcttcatgatgaaaccatcagcaaaggaacctacgatagaaagcagcttgagattcatcttgctcatgaaagatcctaagttgatgaacgggtcaatagtcgctcgggacatccaaagaaacagtttgttgacctacttgtccattagcattctctctgctccaaaggcacgaactatcgtcaacccgtccaatacttcattgaaaccactgaatatagggcttcgtttggttgcctcgatccgtcgtagactccggcttgtcgccaaatatctgattgttagcatgtagaatgcatatccgatgaccgaggccggcagcagaaatccaggcaggatagaggcaaccatgacaattgctccgactagcattgctgcatttcccaggacagttttcaaggtagaagacagagagttgtcaatggtctctacatctctgtgggaacgccttagtttcagctgggcatagcggatttataaggatttcatttccacgaggcactgacttcgaaaagcggttgataatgcgacctgaattcctttgaatgagcgaacatcccaggaagatgggaggcctatggcagtacttaccggacggcgtggtatctagaatccgtgagcagagaccgtctttagctaactgcttccagaaagatggcagtaatacccaccgaaaaatcggaccgaagcgcccatcaccgagtcgagcatggcattatgaatggagacagcggctttgtaagaaccctgcatgttccggaaacgatcgtcagcaatccaaatcactttagactgaagcggagacaggttgtacgtgcccatgaggagtttaatgtggacacgattgctgaagagaagcgtgttagcagcaggtcagaccaaagcctgaggccatttttttggcttaccgatgacaaatgaagcaaggttgatcaagcctagaccagctagataataccctggatgggagtcggcactaggcaatctgagccaggaatgtttcgggtgctccgatctttgcccctggtgggtgacgaaatgttgttgagcaaagccagtgtggggcatcgcaggatacgattccgtccagatcccggtcatcacagcgaacgatgtcccctggacctggtaagcgcttccccatagtttgagccagattcgttccccgtttgtggccagttgcgcacacgccagcagcgcgagtgtgacaatccagacggtccaggtgctggcaacaatgtatgtcttgtaggtttccaacttgacgtttcctgtcgctctttcctcgtccttgaccaatttcctgcctggtcgcgctttcattccggctgaatcaccatgactttcgcccttttcgaggacctgcgtttggcccgcgatatcgtcgtcttggtccgcaggctcgtcccgtttcacgtgcgtttcttcggtggcaatcagctgctcaagtaaccccctgcggcgcaaatcttccggggtgccatgagattcgactcggccgtccagcatacgaaccagatagtcgcttgacggaagtagtagctcgacatgatgggataccataatgacagtcctacctgcggttaaaggaccgtttaagcaatggtcgacgagatgtttgccagtatgactatcgactgccgcaagcacatcatccaagatgatgtgggcgttccatgaatagatcgctcgcgccagagcaattctggccttttgaccgcctgaaagcgagactccctaaatcccggagaaggatatctcagctttcgtttaagcgagcggttaggaacgagggaaatggctcaccctgacgccgacttcagtttcatccccatcctcaagcacttcaagatccgggattagtgcgcatgcctcaagtgtcattcggtatcttgactcgtcgaacttttcgccaaacagcacgttttctctaattgactgatgtcgcaaccaggggctttgactgcagtaggccacagaattcctgaggccagttgaaggatctatctgcgttgcttctttgggcagcatgacgcgacctccggtgcaatccatctcgcccaacagagcgaggagagtagcgctttttccactgcccgtgggaccagaaatgactgtgaatttgccgataggaaaggagaggttcaaattggtcaactcgaaaggcagaaagtcttcctgaacagtggtatcttcggactcgttcacggtcgtagcaggttggagattgtcggcctttcttttggggtccgctccaggggttgcggatacacctgtgttccacttgaaactggcatgctcaaaccctatttgtatgtcgcccaaagttccagaaccggcgggcgtgcgtttcaaggatgagacccaggcgggaacttcgtcctcttccaagaaatcggcgatccttttcaaactaacataggcttggctgatcatgacaccgaattgagctatatatggtatggatcagcttgcgactcgcgttgctccaagacggtgttcgcttacgaattgtgttgagctgcagcatcgaaatgcaaccagtgtctttagcaacgctataaatggtaaagtctcggcagttacaacttacaggttggcggatcatggaaaatagtgacaaggacgtgaacgcagtcgcgactgtcaattttcctttcgcgacgaatatgtacctatggcaaccgaggtgtcatcagctgatgaagcacctcagaaatgaccagcaagcggcttaccaagagaaagacaccagagtcactgccagcggtcccaaaactagagcataatgtcacgcgtcaatcgagaacttgtctggggcataagagattgggagcatggcctctgcttactgtaaaccatgtgaaacattaaaccattgataagattctaagcacgcagttgatcagtcatttaggaatctccgctccggaaatgcgacaagccgtgagccaccttgacccagagtctcatctccgcgtctcgagcatctaacgcctttgctttccaatttttcgtttccccagaaaacttaataatcttgatggcagatatgagctcattcatcacggttatcctcttgtcgcgagctttatttgccaattgttgaatctgaacgcagccgagcgtgatcgagatcagcctgtggaactcggtagtttctccatcaacttgtactcacggcaatgtaacgcttcatgaacagcgaggtcagaggactagcgatgaccatcacgatgaagccgacgaaagctgaatagccaaggagcgaatacaagaaaatcgaagcgactggcaactctagaagccccccgaccacaaaatagaggcctgatatgacgttggagatccgcgccgagtcagatgccatcagcgagacgactcgaccagagtccgcggcttgttttggttgagcgggctgatctttctgcttcttcttatcctttttcgacgtcgttgcgggtggagtttccttgtcgataacgccagacgtgtctttacgcctcaatgccttgtcatagatggccgcgacgagctgattacggactcgaacactgcagcgcctcccatgccaaaggtggaatatatctgcctgtgctttcccgatcgatgcaagtaacgccaatgcggcgtaaacataagccctcgccctcgcttcagcgttcggattggtgatcgcgtcgaggatacgcttgataaggtaaggtgatgcgtagttgcagatcactgatacgagcgtcaggcttatgtccaggaacgtatccagggaattcgccctaaggatccggatgaggagcgatgaggatttatacgacctgagtgtctcgtatgactccctagttcgcattgatcgcgaaagaggcgggacttcattatcggcaagatcgtggtcatatcctgtcttgatcaagggccatacccaagaaaaggtgatccattgacccaaggtgacatcatcgtcgatctggatatcgggcgatccagctagaataaactcgtcggtgaccttcaacccgatagtgacagccagaccgaggccagccaggataagggagaggacctcttgtgctaaaaagacggggtcgtgggcacgttcaggaaatatgccgtccaccgctctcaagtagaagatagaggtcaaagcgacagccgaaagggatgcctgcacgacgtaaatgcacaaggccgaatatcgaggtttcctgctgggatagaaaaaaggaagccctaggagatagatctgtgtcaagccgggagatatggcaattgtcagctccacgacctatccaagaatcgaaaagaccggtctaagactatctcacccatgatatcaatatcagagccgttgtccagatctcccatacgtctcccgcagatttcctggttcggtctatgttcgcgatgatgcggagcccaaggctagcagaccaccacagactgccgacaaggccgacaccgaccagtatagtctgccgaacgatggtcggtcccacatgtccagaatgaaccagggttgccttcacgttgggcggggcgatattttctagcgaagccctgtcctgaccgatatcggtgatagggtgtaccaatcgcttgatgtaccgtggtaccggaaccgagctgctgacagctcccacgacgatcgaagcaggaactatcgccttcaacagggctatggagcatggcgaagtgaaatgctgagccagaccaaagtatggccgagcgggtggaaagaagattagcgaaacttaaccgaggcaggcgtattctcgaatgaaacgctttatacgaacgaattcgtcttcgggacaaactgcgaagcgcatcatggctgcaggtccttgcaaatcctttctgggcggcggatcggcgattctctgagggtccccgcgatcttaaacggacggccgcttgctgggaatgcaggtcgagcgtgtgacaatcaatccactgcacttcccgagcaatcgctgtaagacgatagcggttgagagagttcctggaaacctagctatctttcagctgcaaatacgactagaacgagataacggtccccgtccgaatgcccctccagtatgcgctgagatccagtattagcgtggtagctagagtcctcaaactgcactacgtcgaatggcgaactgactcttgacgctatcttgattcttctcgcgttccgccgccgattcccgcaggatcggcttcgagcgatgatgaatcgagtgaatcacgtaacgatattgacgtaacgatggaccgacatgacggcatatggttcggcgatcgagctcagcaccagctcaggttgtcagcgactagatattcgcacaagagactcacacttcaacatctcgataacatatctttgcttcgaatgctacctccctacaccaccacgaccatctgcgggaaaatcgctcgattagatatttagtatatagtacggcaacccatcataggcaaggtctcgccaagacatcggtcgagattgatgcgacgtagcaggcgttagatggcgacgcgtccagaacagacgattatgaacagctcgtcgttggcatctcagagatctgtccttgtgaagaacatgctgcctgcagagtcatggagtgcctatcaactagagcacaagttagatgcaaatatgctttcgcttaggaaatctcgctgaccctggcaccatgacctagatctcggcttgcgaaacacccgtcctacgtttgcgttctcggaatcactcgcgacgacaatgctgctatctacctggacctagggtgctccagtaagcttattttcactttgaccttggtcgaagctgaacatgggtctgaattagcgggtaccgattgccgtaaagtggtctcggacggttggccggacgatcgggtcgttggggttgacgtcgagcgaagtaagtcccttgtttaccgcatctggatcgggtcgtgatggtgttcgtgtccgaaatgtatagcatggatcgatcttggctttcgacaattcggagatcaggcgacaagcaagatcacattcatagtggcggacgtccttaatggaaatctcttcagcaagagtccccctcaattgatcaggaactttacctctccaaccttggcaggagagcttcgaggggcattccgatgtatctcgacgtttctctttttccatctattcgacgaagaagatcagctcaagctggctgaaacgtgtggcgagctcttgtcgaagacttccggtagcgtgatactgggtgctcaccggatgagcacaataacgggccgcgttcacgacacatctatcggaagcattttctgtcactctcctgatagctggaacgaactatggcgagagaaggtgtttccaccggggctgggcacagaagtgcgggttgacattgactctgacttgcaagaccccgctcatgagattgacggtttgatatgctggactgtaaccgttatttgagagacgcgaaaccgacatgcttcgatacgacgtgtatcagctgcgataacaagtgctctgcggtcttctgaccagactgaacgaacacattgatcgaataccgatgatacgcttctcgggtagctgtacttttacatgttcaagcctttttgtctccggaactcgaatttgattccggacctgccgggatcgacatagcctccgccgggccctctcgcagctcgcagtgatatacaaaggatcacaaatccgcaaacacatcaaaccgatatagacgtggaagtctccggtcacaatcgcaagacagacctataatcggaaatcagcatatcagacaatattcgacgtccgtggttgacctgtgatgcagactcgaaccgctcctccaatggatgccccacctccttacactcgagcgattcggcgtgtctatccatatgagctcaggcctattgtgattgttatcagtatactcgggctcatctgggccactgctgtcggcgttagtaacattcgagatgtcggcgatgaaggtggtgagtgatacgacctgggctctaaagcggacaaaatcgcattctgatcctgttctccttagctacgaccaagatcaataccttttctatcgtacttgggatcatgtatctggtggtggctgttttcgaactatttgctacgggcgtcgccatcatggtgagtgagattagataacaccaccgacgagtggtttaccgatgccctgcattacagcaaaaattgaaactggcgaagctgttcgtggtactcgccccgctcggcgccgttatcgctacggctgcggaaatcctcaacacagtggtatgtgctagtgctttacgggctgtctcaagagcttcccttgacatcaaaatgtcctcgacccggaactacaggtccactttgccctcaaaggcgacttgatacagcaatgtactacagtagagacgggtactagggtctccgattactatggccaggtgacccaattgactgaggaacaggccaaggactgtgagtcctgctgtcctagccgctatcgggtctcagaggctgtaagacctgattatatcgccgcacagggtgcgaacaatcctggaccagaggcaattggaagtgcttcgtatggctctttgccatcttgtttgtctctgtaagttcaactactgatagcgataggaaacgatctcattattcacgggtcattatctcaccagggtctctggtgctctatcacgctgtcctactaccgtcaattgctagatcctgcttcggtgaagacccgacgagatcgcggtcagccgcaggcttatcctctgcagccgcaagccccttatcaaggccatccctcgtatcagcagtcgccttacaatggaggcgattacgctggtgtcggctcgcaaggatatgttcctccataccctggacctccaccggccgattcgccttatgcgccgaggaagggggatggagatgccaaagaattggacggccgagatatgacatacgaagctcaagagcaagcgtggcaagaagttcagcgcagcggtccgaccgcttacactagtacatcggatggctacgctgcacccagcggaccccctcccagtcgacaggataggggtagaaatgaggaggaagacgatgcttggaggcttgcgagcgagaatggcccgacagctcatctcacaggagacaccttgaggcaaggaggaatgcgagtctagcgagatcggagacactcttttttggcagaaccaatctcatcgaagcgtttgcgtgttgcgggtccaggaagggaatcacatatacacgaatgctacgtctcaattgggccgagaaggttatggatggaactgtacagctaccatatattgacaccccgaatcagattatgacaccctgttcagttcccatgtatcgcgctatcaaactgcggcctgctaaccccctggccagtaccgctacggactcgccggggaaaagatcgatctattccagcgacgaacgagaagatcagcgcgaaaacccctcattcgtgtcttctaggcggatcgtacgcaattgtcttcgaagtccacttctgcgtctccttgctcccagtctgctaggctcaaaaccaacccctttaacggtcgtcccgccgttaggaccagtaagtcgccctcgcgctggatatcgagttgtgggtctgggaaatcaaggaaacggtacggttgaggccaatcgcagcgcgatgcgagtacctctccatcggacgatgttagcttgacctgtacgaccacggtcccgcttggagctacagaatcggaagcgattgcttttgggggttccatgatgggtaggtttttgtgtaaatccgtagaagcgttcggtggcagcagtacagtgatatcgtccaatctttcgcaccacgatgggtttgccaggtcgaccgcggtcacggaaaggaccgcctccttcgcgatggatgagttgttgccaccccaaacggctaaatgtacttttcggctttggaaagccccatattcgtagaattgacgtgggcgatcattctctcgattcttctcaaccgagcgcgccacgcccactgaaaaggtcgagagctctcgtttgactgtgaaataggccggcttcggtcgcaagaaatagtcgataatactccaactgatgacagggaacgaatcgttgagctgtggggaatggggagtaccttcagcatgagtgccttgcagtccgcttcggacctatactaccaacctgccaaacaagcgctcccgcgttctgtgatcggagaccgtcgatcaatcacttgaccgcccctatctgcatcgaagacctacgtattcacggccttcgccctgccaatccctccgccatgaacgatacgcaaagcccagtgcttccgactgcaaaatctgcgtgtggtacgcccatctgaggtacgacgcattctgcttgagccccaacattcgcgcaggcacgtaaatttacgagttcatactcacttgtcaaagtcgcccgtcattcgaaacatttccagcatgtgcacagcaaaccgtttgacgtggcttcctgcccggttgtgttgggtcatcatcttactgtctggatagcgctgagacacttcaccgtcaagccaccaatcgacggttctcgtatcaggcgcgcttggcatgccaaactctgacacaagtcggccgctcagtaggtcataatcctgccaaggacgcgtcccagcccagacctcccatctatgaacatctccctgagtaggatcatctgtcgcccaacttcaacactcgagctgtcaatcatgtcccgcggaaggtctgagaacctggctcacctatcgggaaccttgttaggactgccaggccagtacgcgatagcgttgtccgtgtgctcccgcacgacgtctggtaggatcttttcgtatatcgtttgggctggcaagacctgaggttctatctgccattgtagtatttgctgatagtctaccgattttgcaatcagaattcttgcattcgataaaaaaaaacaggtcgaaagcaagatcgtgtcaaagatctcaccttcattattcccacagaacagaacaatggatggatggtgacgtagccttttcacgtttgcaatggcttcggcttccacatttgcgataaattcctgatgagccggatagacaccgcaagcaaattgaaaatcctgtctcaacgtcgcataagatgagcttcccatctaagtagagaacactaccacgcacctgccagaccatcaatcccagctcgtcgcatttctcgtagaacgtttctttataggtttcaacggttgcgttcctacgtcagagtttgactgggttatacatcatgcgtaggttgcttacctggctcatagacccctccgccccaacagcgaatcatattttgatttcccttcgcctatcaacctcgaaaactatgagtgcaaggtaaaaagccaggctttattgagcaaactcgccgccatctccagcagcctggtatatctctcttgctcaatcatggggagtatctggtccgtaggaatccagttcgagccttgcgcaatcaccgagtgagtagggctcaagtctattcgccaatcgccgcggaacctaccgccggcataggtcggtcgaccattaataacgaacatgaaggtcgaacctggctgatctttcaacggtcgacggatcaattcggcccgccgaaagccgatccttttgttatacgtgtcgattacggctccatcctgtaagtagaatatggtctctgttcgatgttgtacatcagcggaggggcagacggacccaccgaattataaagcttgatttcaagctgatatcgagtcggtcttcctgatccattcggccaccaaagttcgactttatgctctaggttccaagaaatgaagctctccccgtgacctgtaatctgttttctctcccttttgagttctacagaacccggcgacagcgtggctaagcaaatttcagcttccaagtgttgtcccgtacgagccgataatccgaggtcgatcgctaggttcgggttcaaactctcgttgacagaggtcttgatccaagggctcatcgaaatagtcgagatatgaagggtaatatcccggtcgggtcctatagtgagcaactccggtccccagtcccatctaaagcacgcctgcattttcctcacgtagacccgacagggatctcccagattgcatgatccggctctaacctgcaatccttatgagaatgagaggtattccagtgtcttgtcaagcaagtagggtcgcttactttaccgtactgcgcttccaatcgctttgcaatttccagagggggacggaaaagtagaagtaatttgttgcagtcctgtagatcgcgcttgttcaaagccacctgttgtataatcatagctgaatgagctatagagacgaaacaaccgatcccgtccagcctacatagcggggaagaaattgattttctgcctggagtatgatctttccgttcaaatatatcgtagcgaacgtgtccaggccctcgaattcaagcataaacgtattacgagacccgagatcaacttcttgtgccaaattaatctcgcttcgaaagagccattctttcttggagacccattgaacaccgtgttcgttcctgcccacgtaaggatgaggtatcttgccggcaaccattaactccaggtgaatctcggtaggaaactgcgaacaaggggaccatcctgaattctgagcctcttcggataagggcacttgggtatccctttccttgtatgaccaaccggtcggtttgatcttgatatggtctgtcatgacgatcgagcgctatcctccagccagacttgtcctgagtcggaatgtcggtgcggcagcacgttttgcaaggtcgagctggtctcgtaggctgattaagaagaacaaagacgattcatgatcattgagaatacagaagacttcagaccagtacgatcgatgaatatatatatatgtatatgtaggtgagatcaagttgtccgttgtcggaccggttcaggtcgggcaaaccccgatcgccgaagctaaacggtcgacttttgttcggatcacgtgccgcgatttccccgagacgacgcgtttcaccggtagctctcagatcccccttccatcctgcttctcagagctactgaaagggcgagtcggaacgacgatgtgatctttactaccgtagatatctttatcgtcttcgtcctgcctttcgacgtcgacttgaatctcggcgtccgatcggcggttgctgaagtgctggcgcgccggccaggtctcgaggacgacgtcgatgggctcagtgtgtgtgtatgtctcggttgtcacttttactggtccggcggccgtctagaacagggaaaatcattttctgtctcagctgtcctcgagccttgccgacattcacagcgaagaaacgctcactttaggcctgatagaatcgtcaccagccgaaacccccgagaccgtgttgatggtgaagtcattttggttgccggtaagaccagtccgactgttcaacgtatgaaaaagggcaaaggcatagatcttcgattggagtctgcggagtatatcgcgatatgatgacgcaggatcaaacttatatcatcaatggaaagcacgtacacgacgctgcacgaagagatgtcgagtgtgtcagtccagttcgattgcagcatcggccggcgacttacaacgggatactgagcgacgaacaattcgatgagtagagactctcacattcatcttacgagagaatagcttaccttatgtaaggagctttgttgaccaaaagggcgtattggcaagcagtggagatggcgaccacggtaggaggcagctgggactctgtcacgtacacaaggtgaggtagcattagctgattgagacgtgacacttgcgaaagggttaccactgaccgaaggtgagtttgagcaatcgagtgaccagacgatccgtcacctatagcaagtgcaaactccagcaaatatccaggcgtctccatcgttttgatgactgaccttccatcctgttctcttcttggccaaaaccgacaagatgacagcggtgatacaggaatcagcgaaaagagttgctggcaacaagactcagagcttagttgtgctctcgatcgatgtccttaacctcttcccttacatcccagccaactgtagacgaacgctttgatgtatacgtcatccggatcagcggaactgccgagctggtgtccactagtaagtgcgatcacaaatgatgacatgtaaggttccttgattattttgcagaaaagaatattaacttaccgaactttcatcaggataccggtcacgaatgcggtgaccatgaagaagatgatgaccccgaggacgtagtagttcttctttgttaactaagaaacgaacgaattattagtggacggtgaaagaattaatgcgttcgcaaagtgtcgaggtcacctggaaggctattcgatagatcagcgatagtgtaaaaggtcagtagtcggtacgcagatataatgtggaccatggcctaccacggtgggcgaagaagctttggacaagtaccatcgcgaagcaatcaaagacatagaaccaagagagctgttggtgtatttccacgcataattgtgcggtaagatgacgatttttagatctgatcgtgtccatccatcacctacgtattcgacgctaaaaaaatcagagtattgcccgaaatgaaccacaaatagattgtagacccaggtcatcgagaggaccgtgaccgccctacataattgctcgcctgttcaattgaatcgcccgtaaatgtcattcagggagctcaactcacaatgccaacgtcatgacgagtgcagcgagacctcgatagtacagactgtcgttgcggaagtcgctgaaatacttgaaggcttgcatcgacagcattccgaagaagagagcatcaaggaactatttcaaaaaaaagcgtcgattgactcttaggtcagaattcgcgatctgcaaacatcgaactgggcatctaccatcgtaatgaggaacggtcctagactttgtcctttcttgggagcgagcaaggtctgcccaagctgttcgagttgttcctcggtaagggcgagcattgtgtcgcgatgacgaagctcgggttttcgaaagtagcagtaacgcggatcctggaagaagttgaggggagtagatgtgtaatttggctcgactgtagatgaggagattccgagctaaagttactttttgatcaggagaggcggggattttggacaattgaggattcgagaagctcttttggccttgcggacagtaatgcgtctgtggaccgctaatcagctgctgtacggctgtctgcatttcatttatgtaattccgtgcactcgcattgactcgggcaaacccccacgttcaaagctgggcttttcggactgattacaagcgagcgatcaagcgaccgagacataacacaacagcatcgcgagctagtttattcaagcgagactcgacgaccaccaacagacgacaatcaggccctgacaaccggtgataatgacatcgcggggcggaagggcaaggcaaaagaaagtgatgatcacgcgcggggagcaacagcatgaatggcaacgacaggcaatcaaatcgatcaaatcaaaggtcctttggcattcttgttgttgttgttgtcgtctctgtagcaaaaccaagttacactatgcagctgtctgtcgcgctgtcgctttcggtttctttgtccttgcggcgttgttcgttacgatttggcaacgtttgttgatggatccttcctttggcgatccacgagagagtgactgccacgacacactttcgggctccgtccatgcccggaaaggcttcgccgatcctcttaagtggatcccgtgactgcaagtggatcccgtgattgcgagtggattcctttctttgtgctttgaacctcgtacaagggtggccttttctgcgtttcaacgaccggcgcggatgcgcatggtttacagacgcgattgctcgggaggtttctcgaatttctcgatgatgagaaggccgagtcgcgagttgcgagtcgagaatgtttgcgaaaatttgcatgttctaacgctgattcttcgactgtgcatctgcacttgtacctgacgcctggcacatcgataccagctaccagcaggtatctgttccaccctacgagcttgaattccagtacctggaagcggctggccgtagtcaccgtcacctcgcggtctctgttacacttaaaccacgacaagagaatcggggcactaccgctgcgataagagtcaatagtgcagcgatcgtaatgaccgcaatgactgctgagatttctgagtaatggttcaatgatcgataaatccgaactcaaacaaactttttctactctttgatggactaatgtaattgctaataggtgactcgggttcatcgacatataagtctccaccaagttgttttagtttagcagttccctttaacggggttgttccgagcgccctcctagtctttcgctgagcgaagaccggatcctcttcaagaaacgtttcgtctattgtacagcgcacaaacagctaatcagcaaagcggtcattcgtgaatgggtgactggtaactcacgagaatcaaccgcacactcgtgaaacaagcgggtcaaaaggatcgcaaacgtcaccaagctacgatagcccttgcgaggtgcgaggtggttgtagagaagtctttcgcctgggttggcgagaagcagtaatgggatgtaggttgtcgggttttcatgtcggactggcaagacgacgggacgaacgctcaacggattgatttcgcaaagtgaagctcgatcaattctgctgcaactcggagcgacgcgtatcttgtgacgtgatgaccccgagtccggatgggatcagtcgaaaataaaagtaccatcccgtacttctctagctactcgcgtctggtgagatcagttctggatcggatcgggttcggttcggttcggatcgatggcatcccccttggctgaagacaacttgctgctactcgattgtcaccatcatctctcgttttcttttcattcaccggaaccttcactctcacggttcttcgcagttgatttgaaacctgctgaagaatctatccagccatgtcgacgagtgccaatttcgcggctcttcttcgcaaatccaaatttgcggctcatgatcccttgatcacgaggatctacaccgctcctacatcctctcggtcaaagggggattggggcctcaagtacaccttgcccgcttcgacatcgactcggcctcaatcgcgatacatccgattgcgatctctcgacgccggacaaggactcgggtgtgattatgtatctggcgagaaagaagcacgtcttatggagacgtggggtgacggccgatatggatggaaccgagaggctgccgaagcatccaaggctgatgaccagggtctttacaagggcaggaagcaaggtaactggggatctactgccccgcgctcgaccacggtcgatctcgacaccttgttcgagccgaagacccctggcaatgcggcctcagaggaagtcaagctttacttgtcagacgtcgaaggcatgagcgaggagcactttgaaaagcacctgagcaaggtcagaaattctcgccagagattcgccgagaccctgagcgagcgcggcgacaagcccctattcgaataccgccagaccggtggggctcaggtcgaagagtcggcacctacctttttggcgaacgatgctcgttctgagaatgcgaacattgccagtcgcgactctatagcgcctcgaccccacaaactctcgggcatggcctattcggaaggctcctacgctgacagccagctgcatcctctgatgtcgctgcctggcagggtattgaacggagtgaaccgcagtcttgcgcaccaggaccaggcatggctccggtccaagcacgctcttgccttcaaccggggatcgacctcgaccccccaacaagaagatgtcgctgagacaagggtcgtaggtctgggtggtctcaccgcgaggatgccaagatctcgatcagaagccctgtcgatcatggatcctaccggaaccgatccggaagacaagtccacctcgactttcagggtcacatcggcaaggattgacaatcctcctcaagttgtggcatccttgccatcatcttacctgtcctcggtcgcatcaaatgatcaatcgattcgccatgtcacgcctcattctcgtgattacgccagggcagcttcgcaacatcccttggacgacatgcgattcgagcttcaggtcgctgccagcggccaagctgaccgctataacaaaactcaaaatggcggcgatagatttgtcggccagaaaggctgggtcggcgccgtgggaggcaatgacatgatagacatggcccttgccatgtcaggcggatctcgcaactcatccactaggctcaacgctgccggacgacgtgcggctcgagctgaagagcacgagcgtcaaaaggattctatcgatgagatccacaagctgctcagcgatctcgggaatcttgacaaagcagaccgcgccgccggcttctctggaaaaagaggataccacacgagcgccgtcaggatgtcgccttctgatagtgatttgcccaccgctcatatcggcgagggcgaagcgaagggttccgagccaatcggcggaccaggtgtaggaggcaacaccaagaaggatgctggaccggcgggtggacttgccaaaggcgagtggagacaacttgaagagaacgtcgcgggggaatccaagtacggcgagaacctggacgagaagaagcaatgatccgggcgctgtcggactgagagatgatcggttaattgtaatagcaacggattgagcgaattgtgacatagaatagcgatcgatcttcaaaaatctaaagcgttgacatgcaattgtgcagatgctcaagacaagaaaggagcgtcttttcttatcaaaaccacatagaaacgctccacgccacaccgcttccttcccctcgcatggcatgccaccagcccggtggcataaatagcaggtcacctggctcgaggaccgactccatgcactcagcttcaacgtgtcgatagaattcgggccacctttcacgatcatcgggcgtgaggtcaaatacgcgaaccgtcgatgtgtttgtcgtgtacgcgtgcgagacgatatcttcgttcgcacccgggtccgagccgtgggcgtacatgtacggggtcattgacggaggagcgagccataccctcttgtgaccaagtacttgggcatagcagttatagtaaggatcctgcgtcaaccggatctctatcagcgtagttggagaggcattgctcgagtcgtgctgtacacaccgtgtgcggcgggctggtcacggacttctgaccggcaccgacccatacattaacgacgagttcttcttcgttgccgggtggttggtagcctgggaacgaatccggagcggtcggcgctgcgaatacatagtcgggcataatgatatctcgctgcaattgcgggaattgcttgagaagcgaatattgagccaaatacattggagattcagattgcgcagcgttagctgttgtgcggaggccaggcagtgcgtatccgacactttcgaggaattcccgaaaaggcacaatgcgttgggtccaagcagcatcggtataagaggtcccgacttcgaccgggaccaccctgtcttcgccgacaagcttcactagatattccatcgattgccatttctcaatcgcaggccaactcaagccgtacgggttcaacctatcgtccgccttagctacgtgattgcgtaagatgaaaggcctgttccgtccgcagtcattaaactgcgatatcgtaggcgggatcttcagggctggtataggttgtcgtgatccactactcgcatatcctgtcaaacgctgacgtttgatgggccgagcttctgtcactcgggaggaaccaagactcgttgctggatttgcgtcgtttcttagaggtcgttgtacttgctggaggaccttgatcatggactggatcgcatcttcacgaccgattgcaccagcaataattatcgccatgtccagcgccttgatgctttcgccaatgcatcggcgggagatctctccgctgagcatttgcgacagaactatgccagccgtagcatcaacgtagagacgaagccattctcctcctactgaatcgaaaggcagcgactggattttgcgacgtgccacagcgcgcagcgcacggaaagtgaatgttgggttgttgtcaagagacgacccttctccgtctcctccaacatacagcgataagaaagcgttgtgaagctggtcgactatggcttgtccgcattttgaaaggactgtaggtatcgcaggcgatctatcagcccatacgtatgttgtcttggtcgggacaatttgccaataggatgcagtcccgcaccatcactatcaacagttctggcaaaatgccgagccagattcgcaacctgctccgatagactagccgctggagtagttgacatgaggcgctcttcggattgtacgatttgggttgtagccgtggtctagatgacacagcggaagtgcagtagtcatgatcaaaatggtcatggcctagtcactagtcgtagggttggatgggtggtaactgataactctgattgctacgtgctaccagctgctaccctaaatatggctgtacaaatcggaggacgccgtgtctcgcgcgccgcgcccgaggtctatttctttcgaatcgaaagcgcgatcatgtcaccttcgtccaggttgacactcgccaacgtgctagcgttgctcagaaccttgggtcccaggtctagcctcatcctggaaatcggaagctgtgcttcgatgatgccagctattcggtctcgcagcgaggaaaccaggaagttgagaggcaaatccgaaatcgtgatgatcgacccgttaagcttccactccggcttctctggcatattgggaagttgcactgcaatggagatcgggttcgggtgcatagcgatccactcggtctcctaaaggcaagtcaaagtagatcgagttcagcagcggaaaagaaaggaaaggcgctgatcgtcaaacgtaccggataatactggccgcctggcagcttttcgatccggggtctctttgcctgcccgtcttcccctggggaaccgatagcatcaaagggtcggacctggccggttgcgggaggcacagggctccccatgccattaaagggtggtggaccgccaagcgcagccatgcgagatggatgcatgggtataccacctggtctcacaggaagaccgccaggcgcggaaggcgactgattcccgaaatcgccactcggccccggtccttgcatgtgcggaggcattggcgacgagttgaacatggaaggatcgaaggcaggttgatcatggaacggcctgaactccccgtagggattgatcatctgcggcatcgacggcgcagaaggcgctgaaggtccagcggacagtactgcaccagtaaaagctgtacccccggcgggcggaccaaccccggctatctgtgcaggggcaacgtcgaccgacgccgaaccgatctgaggaccgatagtcgcacttgctgcagtcctgtacatgagcgtcacgaagggagactcattttagttgagcaactttgcgacgaataagggaaaaagtctagtgaactcacggaacgagatgatgtttcttctggatggctgcgatctggtcatccagattgaagcttttctggaaggtttccaaagtggtagctttgcttgcggtatgaccgtcccaaatgattgcctctttggccctccttgccgctcgttcttcgtcctcttgctgcttccggcggtcttcttcttcagcagtaccgaataagtcggtacgcgcattggcaagctgtttgagcgatccggcgacgtccgcatttaccgtcagtagcgcttgctgcgtctttctttgttccatgtgctgctgctgttcgcggtaacgaggatcgagcaattcgattcggatatgttccgacatctcagtctctggtatagattgtttgcagtatggacagatagctgtggctattttggcttttccagcttgtcggccagccaaacctgacggttacaagaccgggtcaacaacctgaatgtacgggccacccctggagcgacacttacctttcggttggtaatccttcctgatcttcatccccgcttggcccatagctttcgcctggacttctcgagctcgggccagttcctccgcttctcgagtcttctgagcctttgcctcgtcatcttcactctcctcgtccatctcaacatccatttccccattggcctcgccggacgaaactccctggcctgtggaaattggcggtccgacctgttccgctccggtctcttcaactatcatggctgccatacgcttctcgttcaaacccatcatcctcaatgcttcgatacttgttggtggaggtagatcgatcgtttgatcggccgaagtaaactcaatgttctggacaacagcaaagtcctgccaatcgatttctgcaaaggcttgagcctctttctccgcctcctcttttttctgctgttccttgtcctttctaagcttttcccattccccacgcttcctggattcttcgagcaactcccatcgattcgacttgcctcgcttcagtctcgcaagctgttcctcgcttgggtgcaggacttgggcatattgctcaaccatgcgattaaagtatccgtagagtgaatgggaagggcgaaggaaatcgaattcaaagttgcgaccttcgcgcaccgaaagactctcgaggaactttcggccccgacgggctgtgaaaagggccgtcaggcgcagggtgtctctggagatgacattgtcagattacgtttctttaagcgattgaaacaccttcttgtcgtcagagttaactcacagatcgacggccgtgacgctaggcaactcgaccgtaaattcgaacggtcttggttcttctaggacgtccttctgtcgtgccttcttcaatgcatcctctctgtttcggcgctgctcttcggtctctctctccgttgccacagcctcggtggtttccccatccgcaccgcttgaaaccggcgccgtgcttcctgataacgccgcttcttctccatcttctttgactttctcaatcatgtatcgatagtatcggttgaaagggtcggaatcgcgaagaaaggagaatttcggatcggcccgttgatgctcccggatgcgatcctcgagaagctggggcgacggggacttggcaatatgcactgccgtcttgtcgataatgcctgtaagagttacaccgatgagagtcgacctcgagcgcacctagatttcaatcaagctcacctcgaatttctttggatggataaatgatacctttcagtaactcctcgcttcttttcgtctcttcccccgaagtaggagccgccgacaatgctgcagcgaccgggctatttccctctacgccaccattctggggaggaggtaaggtcaaagtcgacatgtttgcttgatgcttgttattccggatcgtggccaagacacgatcttgttgagcggggctgtctaatgacgcaggcttcaatgtctagccttagatgacacctgcagtgtcgacggtaaagaatgagggcggtgtatgaagtctcgcccaggatgcaaagaaagtccagctatgtgaacagaacgatgttaagggccgatcttgttatgacagggaaattaggcatcatcattgctcgagccgaagtgactctctacctggagatggattcgctactacttgggaacaggcgaagggacgtgcgagagttgaccgtagactgaccgcgcatgaagcgggcgtccgtccacccgaggcgtcgaaaccgcaccgagcacgtcgtcatgtacgattgtctaatgatgcagatcgatgtttggtattgggatacaagtcagagctggttcgaaatgcgtaatgcgattcctaagcgaggaagaagatactgagctacattccagaacccaacatgcgtgaagaaccttcttccgcttgagtcacgctgcccagcagcagaacctagattcagtaaaacagtcaattgcagtcgcaagagggttcggtctggctaagctgtgacataggcttacatcaggagcaaacttccagtttctgaaggctcgaacgatgttagaccaatcttgcagatcgaattcgcgcactagcttggcgggatcgactttctgctgacgccctaactggtcacccgtcaggtgtggtagcaaattggcagctcccagaccaaggttcctgagcagttcgataagatgtcagattcgtgggtctcgataaagagattcggaggggcgctgacttgattgctacttccaaagtgctaccctgcatgacaaacatccgcctcaagacgtaatcccacacgtctttagagtgcttgtcgatccaaggttgtttcttcggctgtaaggtcaaagccatcattccagggcggccttcctctcgcttcgttctcttgagtttaggatagtaggaatcgctcagcgaatcttgttgttccctatccaggaggctgtccactgccgaactgcttctcgaacttctcgcagggagcggaccgaaatctgggtaccgagacagtatttccgtaaatttggacttgccgaaagatgtgcctttgactttcattttgcccgctccggatgctgatgtgccgaccagagcgagcgcacgaggcttaagtttttctcggtccagacgttgcagacgtaatagctgaacttcagacatcgtgtcctccaggttgatgtcaagataactgctggtcgccggggtatagtcacataaagccgctctcatgaccgacaatttgcaatacgctttcgttccgggaacagccgttagccgctgtggacatgaatgagtcaggtttccgcagggagcgatagttgcaagtcggtaaagcaacgtacatcaaacaaggtggggcgcattatgaggctaagctgaacccttccatacttgaagaaccagctctgattggccatgcagcctatccattgtgcgacaagctgctcgccaagatccgattccgggatctgcgccacgaatcgtatgtttgggggttctgtagggatccttgcaaagcattcagctctagcggaaacatgacatcaggttgcatcgatttgcaaacggaccctgttcccaactcttggctttgacatcttcaaagacgttcatctgatcgagttttgagaaggtcgcccagtcgtagatcgtatcgtcaacaaccttgagcctattctcgtacgaggaggaccagatagtcaacatgtctgcgcttgcgtacgttgtgatgtcagtgcgtggcagtttcgaaacaatcgataagcgtaccaggtggtctatcggtggagatggattgctttgcggccgttgagtttggttgaattggatcacaatccgccggtgtcctacttgggtcgaccgccacgcttttcagttgctcgagtaggctatgggcctttttatcgttggttggaatgacaggagtatgagatgaaccggacgagtgtccgagcaggccctccacgtcctcatcatcttcagtcgctgatgactgctcgctctcaatttgcgtcgattgatctgctatgtagctgatcgggtccgatggcttctgcgtgctgccccgttgttgattcgtaagttgtttccaggctttcccgatccgttcctctttatcaatgtgctcttccggttcttcagatcccaatccgtatcttctgaaagctgaggctggttcaatcgccgtcaattttgctacagtatgctccggctgtttcaaaaaagctcttgttaggccacccatgcctgtaaggcatcgtgagccggtatgtcagcgctcaatcggtcacgaccgttggaaaaagatcaactcaccagggtatgcctccactacatgagtccccttcttcaggtcgagactgtctacgatttcttccgccaaaatggggtctatgacgttggttctcttcccagacttgttgcctccataagagcttagacggttgacgatgttgaaggttgtaagaggaaactttttcgcccaatccgttctaggtgggaggggtggaagacctcgcaggacagcagatgtccgcatgttgttattagcttccttgttgtagatacgttatcgagtcgccgatggatcgtattgtgactatcccgcaggttagccttcctttcggaatggaggtcaatcccagacaaggtcaccgagaaggtcgaacgaatttggtaaccctgcacctagtggcagtcgacgaccatattcaggtgtaaggaaacttcggtcggtttaaaagacgagcgaactcgaacaaaggatgggatcttgttatctgactttgcggggttgcgatgaatatggcaacacgatcaaatctcaaagattccgcaatggtaccagacgtcgagacacggctgtgagtcatgcatgatgagtcacgtggtctggaagtttggcgcatcaggacagtcttgggattcccaaatgttcaagaaagcgtcgagaaattacgttttgacatgaccatcttgaatttatgaatttgtcctcatgcgaaagagctatatctacaacgaagccgaaagccgcacctcctggccttcgtgaccatcttgaccatggcgaccaggcagagcataatctttcacgacttttcacctcaaaataggaatgcatctaatcctgcttatacagtcgtagatcgtttccgcaacctattcagcctgcgattcataatacgatgtagttttcgtgaatgctccacttttcgcatgccaggaatcatgcgccgccacttgtacagattcttcccgatgtagggcaacctccagcgaatctggccagccggtgtttctgatgtcttcagtgcgtttccaggagagcgctgtggtccgtccagtgcctctttccgcgaccagaacgaacggaacgatttagatctcgccctgctcgtgcggtatgattccgaccactgccacagaccagctttggccttcaagacggaccgacgacatcgccgctcgtagccatacttggccaagagccgccagctgactatgccaactgactgctcgccccaatttgagatgaagagattgaccagttgaagggctcgaaggttacgagccctctgacgcctcagagctgagagggcataggtcagagtcctcggtgtaggccggacttgccttcctctcacgtgtaatgccgcttggaaggcttctatcgtagcctgtggtgggaagcgagccgcgaggtgtggttggagataaagatgcaagagcctcaacaagatggcctctgacacatctccttgcggcgctgaaaaatctgaactttctggcgttcgcgaatctagcaattgttcgagcctcgtagtgatcgaaggtatatcgggaaagggacctatcgtcctggagtcaatctgcgtgtcctcggcgactaccaggccatctcccaacccaatacgagatcgttttgctgcgaagctccctttgctcgaaggcgagttcaggctatacttgacatatgcaagaaacaggtctggagttgggctcatggaaggcgaccctagtaagactctggcaatcgaccacggcagaatcggttccgaggctgtctgtcggacctctaccgacgatctgtgctttggagccgcactcacacagctcgtcgcgccaagctggccgggtcttgtcgatatttcaggtagccgggacaggcgattccggcgaccttttgggcgaactaccgccacttctgtgacagcaggcgtagcggcgtcgggcggtgtctgcttcagcctgccagctctgcgttgaacgcctagttgcggctcaactttgctgtcaagcaagatctgtttgattttgtcgttcgattcgcgggagggatccaggatgcgtacggagcggtaaactctgtccatgatagaaccgcgatagaaaggccgttgcgatggcgacataggctctcccgcagcctgagcgccgaagatctcgaccggattttgggaaggcgggagttctcctgatgtcgaagttgcgtgcatccggaactctgtcccacgcccggcacctcctcgggaccataccccgcgaaaaatcacctcgcggaattcctcctctgggctatttgtattgcccatgagcgacggttgcgcagtgatcttttccgaaaatctttcctccctcatttgagctagcagtctgcgtgctgctttgaagtcgctcaagcgatacgcgtaagcgaggactatattgtaggaccgtatacttttgaagtgaggtttggccgcgtggaacctgataacttcgcttaggggcggcggtaaccgcgatgaaagaacggtgtggaggcatgataccagatcttgacagcttttgatgcttccgatgtccaaggctactttgctctgaggtcggttcttccattttggagcagtttctccttccatcgcgctcgccgacgtgctcggtcgggcggaaggtcctgttgtgcggtctccaaaggcgctcacatttggttcgccttcagtagcatcgggtagaacctgcgaatacaggccagactttgcttttcgaacggcaagtttggatcctgacagataaggaacgtcgcgaccgcctaattaaccaagcaagtcgagcgagatcagccatatattctcacttcgctgatggggaattatcacggactagtttgggctcgttcgcttaccctactctctggagttacttcaccaagggtagtaaaaggcaatccatagcagtgacagactttagattgacgaacgcggcgtcgcttgacgcacgcccaggcggatcggccttcgatgaccgagctcgacttgatgttcgctcctgtcctggcccatatcgacatattccccaaggcgactgccgcggttttgaagcgataagtaaagtggagcagacactcaagaagaagacggatgacctggtctaagatctcggggatcattactacgagggcggacaagctatgtgcagcagccatgcttattgcgatactcgattctggccatgcaagagcatgctgcagcgggaagtacaagaagcaaagtcacgtgattcgactcgatggaagggggcgatgatgcggaagcaaaagttgcaaagaatcttgaaccgagattatctttcgagagaccgacgacctcgggatgaatgatggcatgctctctaggttgcaacaactctctctgcgaacagattgtacggacatgcaccgccgcgcataacaaaatcaaacatcgtcgccaccactttcatagccgttgtttattgtgctgttagccgctagtaattcgtctaccccggtaccaaaattcagtctcccccgatctcacgaggtacacatccagctacttgaattttgctatggtgcaagtggaaacttcggcccagggtttgcggaggtcactagaggagcgcgaccaagccttctcaaggctgatgaccttgatcccggcgcgttactacattgtcgacacgcccgaagaggtgcgcataattcgccatgaccgtcatcttcaacagtgccgctaacatgacatcctctttcgatctatctcgcggtttgtgtgaaatggctgaacattattatcgatctggaaatacaggctgataacaaatggatgaagaataaaaagaagcggtcagcggaagagattacgcagaccaggaagaaggccaagttcgacaaggtaactaggcatcgtatcacgtccagacacctatctcatgcagaagctgattgtgactctgccccgaagttcgatcccgagaacgacaagtcgattctcgaattgcaagctgaacgatctgcatcaaacggcgatgattccggcagccgcttgacgccaatgaggccgaccgcgtccatctccacattgaggcagaaattgcaagacaagatcgactcgctgcggaagggaaggaaagctccattgaacgatacagcgagagtagatgacctgaaaaaggggaagacagaggaggatgccctgtcgaatgaagcagcgagcgatgatggctccctttcagatggggataatgacacgctcgcttcccgcgatgaaatgctcgaggcgcgacgcaagaagagaggagaggttcgggataataggcggagaagaagaaaggaagagaggcgggcaggaaaagaagctactgagaagcgaaaaccggataacaaacccggcgaaaagtcgaaagcagctgactttacctcgaagccgggcaaagttagtggaccacttgatagcgccgtgaaatttcagactcgttaacgcgcacgcctatccctgattctcagacgaatctgcttgttcccaaccctagtggtcaggcaagctcgagcttggcttccaatattccggaatcaaacgtatcgttcccgtcgatatcgttgccttccgttggaggcacaaaggcacacacccaactcaagtctatttccaatccaacccaggcacttgcccatctgaatgcacagaaggccaagttagccgacatgcctgaagaaaagaggaaggaaatcgaggagaaggagcgatggggaaagatgttacagcgcgccgaaggcggtaaagtacgggatgatgagaccagactcaagaaagcagaaaggaggatggagaagcagaaagccaagagcggcaaagaatggtaagctcgcgacaccgatcatcttgttcaaaatagcttgtttaacaaggaccaattccaggggtgaccgaaagcgccaggctgagcaatctcaagctatcaaggcgaagaagaggaacgagcacatcgctgctcgttctgatgccaagaagaacaaaaagttgggtctaaaaccgaagggtgacaaggacaagggcgctagcaaaggcaaatcgggtggttacaagggcaagaagcctgatcaagataaggggaaggggaaggcgcggcccgggttttagatacgggtcgagcgagttcgatagcgatgattgtctgtcacggcggccgcttggtcgatgctcatctggacccatacgattatttcggttattgatcgaaggcaagcttagcgatcgatgcttttgtcgagtgcgacaaagtccaagcacacaaggctaccttgtttgaaaaatctacaaacggtctcaagacgctctttcgcccggtaagcgctttaagggtgagatccatctagtctcgttgagcgacgttccgaccacctcccgtatgttcaaaaaggttttcttcgagcgcctcagttgggcggactgttgaagctggctgcaggtctgacgggtcggtgcccattgtggaatgtctgtacaaggcacaagacactggtcctgttctgtacagtcgaaggacagccatgcgcctcatcgcgtcgttcctgagatttcccgtttccatcagcccgattggaacatcgcgaaaatgtctgctagctgcttcgtccattcccaggcatatgacccaggtaatcgagattgacataacacgttcgtggacatcatacactttccctagggcattcgtgcacatggcgcagcttgaagtccacgccaaagtgctgttgctttgtaacctggcagcctcgtgggttcatggtaagtttcatcatcagaagtaagcacatctctgttctctgatgacgtcgtagaatgatagtactgcgtgtatggtttttccacctcctccatcgtaccgtctgaacctgcatatgatcataactgacaacatctgcaagggaacatgaagagaccttacaaacagccaagggcactgctctcacccttacttgcttccaaggatgtaggggttacaatgtgctttgacaatctgggatgggctggattgtgtgccacgagcagagctgtgtaccaatcacactctagttcaagttgcaatatctttggtagtgaccatcaactcctgtagcatcctgttcggtggtgtggcttccttggctacttctgctacagccgtatactgttaccgtcatggcatagttttctagttagttcctccatgtatttctttgttcctgccctgaagaatcatcatatgatataaatttacaccttacacatctactattcaacaacaacctcacacaagattcagcaactgaattcttgtcagatacttcatgttgggagataaacaactactcaaccaagtcctgttgctgagttcatagtgccctcatacaattcactaccaagttgtatcccttgatgattacaggtacagttaaaagtgaatacctatgtgataaatatgcttgatcaaaatttctgcgcctgactgattcaactgcttggaatagtaccctgtactactccttcttgccttcatatctcctgcattgtttttcagagtatgtttagaggctgtgtcggttgcctctgatattgttgtcttgttgaccagaatttcatctcagctgccttatgacatcatcaagacggtagtaactgaacctgctgatataggcaacggcaaacaacatgtctagttgcggtgaatatattgcacctttgaaggacaggtaagatgtggtgttaaagaccacaaaccgatacagtacaacacccacgctgaaacaactcactgaaacaaaaccgaaggccaacactgttccaacgcagggcaagcagcataggcgcatgaaacaagaccaaccttgccaaacagtcaagaacggtaccgcactacagaattgaaatgaggcaggtgaaccagaccaagtacagaacgacctgtatggataaatcaagagcatatgcctgtcgcatccaacacaaatcctactttatgccaaaagagatatcaggggaggctacatcgtgagtcaacaagtctaaaagtgggtgtacagcgctgtacaacacagctttgcatgatatttacgcatttcctcattgtgagtaccgtgcctcgccagctctcatacagcattgctattacatcctccacatacgtcaagggcctgcgtgaacacttgtcattgtaaactgctccaggaccgctttcaaaacccaacattacctctacctcaagcatctcatatctgtgacaactcaattggtctctgaattggaagctcttgaacagagaggtggaagccaatatgtctttgaattggagacagtactggggccttggctccagcagcctcaggtctatcactgggactatcatgatgtttcaaggtttgacaagtcaaggtgaaatcaaagtcaagtcgtgtccaaggcgatgcaaatatcaatttgaggttggtggcatatgatattacactcttgacttgttacaaggggcaagagtgaaaacaattgagatcaaggatgaggaaatgacttctagtacatgtacatgtcagaattagatgagtctgctcaagcaaatttgacacgatagagggtttaacgctagtacatgagatgctccagtgtctggatattgagtccatattgttccaatgtctgacaatataagatgttgatgtgttccaatatctgatatgacaaccaattgtatccaccatggagttactggaggtggatctgaggtttggatgtcaaagagtatggttgaaatgcattggtaggcggatatgtcaagaacatattcaagatggatcccttttgggatgttgggggttgcttggagagttgttgaatgtcacagggcgataccgatccggcaccttggcactaccgtcgtgcgaactgcggacaggtaagcttgaggacaagctgaatacacataccgtggatatgcctctctagtgtttcatgtgtctggtacaaggaactctccaaagtagtgtcctcggagtccatcacgtgtcatcgccggggaatattccgtggtgacgtccaccacggtatattgtggtaagtatccatggatatgacctattgacctaaacggtaacagcagcgagactcgcccgtaacattgaactcgtgtcaatagtcaatatggtgttgtgatgcggttgttgtggtgaataatcctgacagattcttctacacctgggtcttccagctgagtcctgggattcaagtagctagctgtcttatttctgatcatttccacttgtttaccaatatgaccttactgccatccatctgaaatgttcatattctcagcaatcattctcagcaatcaagagtagagccgtccacaaactcatgtctgcttgcgttactcaagtgcaatctgctgatgattttaaagactaactctttcaggtatatgtgatgggctgtcaccacctccaaagattgctccggatccgaaagtcatatgacaagctcgaggtatgtcgagttcttgtcttgcttgtgggataagggcgtagagtctaggggcaaccctcctgggaaagccatgtaaccatcttggttcgatgtgacactaaggaaaacagtttgtatatcgacctagtacagtttcataagcaagtcaagttctacaaggacagatgacgatgtacttggaagccacaaacatttacgatgagcctggcgtggctaaatccttccgggtatttgggatttgtccctttacttatgagtcgaaccgatcacttacatccaaaagcctagccatctaacaagaccaagtgcaataagactatcacctcctgcctcgaggatgtggagatgatcaaggggatcgaccgatctctgctacattacctacctacggttcggcaagaaagaaaagcccccatttgatggtatgaaggataatatgtgcaaatactgcttgctgctttgacaatgatcgacccgacagtgtgtgcatatgagttttgttaccgctcaggctgtaggcgacgactcacccaggagagcgcgtcatgtgatgcgccggaggaggtctccaaggggatgccccgagtgaaagtccgtctgttgacattctatttcactgcaatgttacagatgtcttaggcatcccttattacttatacacaatggcccatacctttgcccctcccccgcttactgcccctgtggaaccttccgatggaaccctccaccctaaccagtatggatacacacaggatggtgtgagtagcgatcatcaatccgagagtgcaaatgaatatgagcgttaggtgatggtgatggggattcctctgcaatccagcaggacttgcgttttagaacttatgtccaggatcgtgcaacagatgcgacgctgacctctacaccaaggtacacaaccaggacggtttccctccgccatactatgtttctggttagggggaccacttcaaggaccttgagactttgcacatgttcgatccttgccacgggactttttttggttctgtccgcgcaaaacttttactcccaattgtctggaaacagatcgcccacctctcagtgtgcttctgactttaatcacaaggtatacacatgtataggcgcaccttgccgaccagttccgacactcaaggtcgtcttcccaccaaccctcacctcctaaccagagagccagccacttacatccccatgtccccaccctaggcgtccacttggctcaatctaaagccagcacatcaaaatcgtcgagtatatcaactttgcaacaatttgagattcgcgggactcaacgcttacttgccatctattaccaaccacttgagaatgagaaggatgccaaatgatgcgcaattcgggtgtgagtcaccaggcgaccgcgtggcttcttgtgttccgctctcagcccatgttcatccgttcggttcttgtagacaactgccaccaagagaaccagaaagagaaagtccaatgagaaggaagatgatgatgaggcggaggaggatccggtgaatcccaggcctgcggctccccaaaagaaagagcctctgccaccaaaaacccaagtgttgccgcaatcacagaaagcattcaggcagcagtcactcataccaggaacatctgtcatgtaatgtatcattctcttgtccatgcagtaacgcgagaaagcccttgtggagtaaatatcatatctaatggtgtgcagtgcagctttaagagtcttccaactgttggtgagtcgagcctgacggtacaggagatcacccacggaagtttcacgtgagtttggacgaagtcaaacaatgacagatccctcccgacaaagttctgtatgtagtccctcgagcgtactataatgtgtggaagccttgggcgtcttttaatgcttatctatccatggtatcacctaccttttctgtctgacttcttttcttgaacggcgttcatgggacgctccgagaggtaatcatcccgtatggccaaaattgatgtggtagtccagtactgcgtcaatcatacgattctaggtaggcatttataagggcaaactgctgtgagtggtatgcagagcacttagctgaagccttaccctggcattcaaccaggttgtgttgctagactcatcatgacctcactatatagcaaccatgatagtgtgacttgttataccttattaccgtgtctatgacaaagatttacggaatattagccaaaattgcccagcttcagtcgttatgacggatgtacaactaggtactgcatctctgcatctcgtttgacaaagacctacatccataacagatcagacacgtgcacggcacttgaaaacaagtctagatcgcaatatgtcacagtaaaggtcttcttgaaaggtgaaccagagaagtgagagggaaagcgtcaccgtgaagtctacatgtattaattagatcagcatttgacgcaacattgacattcaacgtggcatcgatcttcaacccaacttacacgatgggtatcacccctacctgtacatatcgggttctaaggtatactttgggactatagcaaaggaatggaggaacaagagagtttcaagtgagtgaaaggaagaacaagcgattttgataggtgcgtgaatggaggaacaagagatctcatcgagcaagtgaaaacaacaagcgagaggttggagcattgagcacaacagggttctatggttctattccgtactatacatataactagaagtagttgtttgtaggacacaactgcacttgagaacgcaaaggaatcaagtgtcatcatggcatctcttggacaatcattgccataagagtatatttcacaacacctacagttaactatctcaaagctcttatacacctcttagcaccttacggtactccacgtcaacgttcctgatactccctgcgcatggtgaaccctcctacaggactatactgtataagtagcaatgctggctgaggcatccgtggaccgtagtacaatagtatcaccacaagaaaattcatttgtctgcctcccggtcatcgttatccaggttagcgtggttcagtatgatttccgcagcctagctagctgggtcggctggaccattttggaaccagccaaagggcacgtgttcaaaagtggttagtagaatatgtaggatgtgaatatcacagaataacaggctgacaacttatatgtttacactgcaattcagcccaaccatggtgaagggatatataaacaagcgtaagaggaaatctctcgcacaagtcccgtatgcatagtagaggggtggcaaatgtggacagacggcactatgcagatacattctatgcctacaatgacagaccattgtaaggctggcaggttctattagaaggttcgactggagaagtgaacgggagaggggcaaaggtaggggccatcatatataaacaataatgaatgcccaaggcatccgtaactttgtagtacaattgcatgtcaactaacagactttcaccttggacatcacctccagcatgtcacatgccgtgctctggggaatgctccactgcgtacggcccgaacggtaacataatgaccagcccatctcttcgctacaacaatggaccatttcctgatatctcctaaagtaccataggcaatctacaggtggcccttggaaccgtctgtaatagccaagtttgtcacacaggtacaggtcttgagcgatgttgggggttgttgctgtggacacacatgggaagtcaacagggagagtgcaggtacaggatgatggacaagttctttactttacagctctgtgctgtacagcattgttacggacgatcggcaagcgggtctccggtacagtacgtaatgatacataacacagctagatcaggtacacaggtctcaatgacgtgttgggggcggatgtatagttggtgaagacgcatgagaagcagtaagagttcagcgcgcgcgatagggcgatgtgtatgtatactcggcgcagtattgtgcagtactgtgcgctcgcttgcgtgcacgttggtgcttgttagtgacctctcctagtacgtctcttgaagtaagcaacaaggtaggcgtatgtcaaatgtaatgactgcgcttgaatcatctagagttaccagtttgtttgtaacctagctggttcacgcgcctaaaatatacttctaagacctactgcgttgttttgcgttgtaacgtgcggtaccgctgttgcgcgttggcctgtgggttgcgctgcggcccaattgtatcccgacgttcccggtgtggactcgataccgttaccgtgccgtaacatttcttcttgacagtaacgtccgtactcgccctgtgacaaacactctcaattgacctaccggtgttggtttgtaagctcttgcaggaaacctcttatcaccaggtaggctgtgtgtcaacagtcatgactgcgcttgtatcattgacaattacaaattgtcctgtgctttagctgatagacgtctttatctagtctggcgatacatgacaccgatccgcggccggggcgcacgtcacgttgtaatccgatgctggtctatagctcagctcagcaggccagctcagtgcccgtgctgcaatgtagcgctttgtggttccttgcgaaatgtctggacttacccttcgatttgagccaagtcttgcattctttgaatctgtggttatagttgagatctcagttagaaccaggctttggctaatttccgactactctggacagaacatgtactgttggtgtcctacttaaaactgtataatggatacagtactggcctaccaaatcagtgcacgcatatggggcattcatacctggatttctgtaagtctagtgtgaaatatctctccaaggacttttgcaccactcatcacataacatccctgtccggtggaactgtctgcatataatggcataaataaaaaaagtgacatcaggcacatcagttgagcaatcattctgtctcaagttagatttgttgaggcagatgcagactggattctggactaaaatgatgtgagcacagttgaagacaatgcgcattggtaggccttatcattggtagaccttatttctggatttccaaaggggcaactgaactaaagtgtaatcatataaatgtagcagtccagtatgtcaaggtattgagcacaactcgcatagcaaattttagaatggaagatctcatcaaaagcagttaccaggaaagtcacaggaggagcgaaggatggggtcaatgtgtataaacaacacgagacgcccaatgttcacacattgggaagaaattgtcaaatgggcttttgctcacactgttcctcggtgaggctcgtttctaagtcagttgacttgctccaaggatttgctgcagattgcccgacctgtagcagcaaatagactagtgtcgtgtgttaccgctcagctcgaccctaacatcatggacctgatacataccagacacagtgttggcaggactaggcagtccagttgatagcgtgagaatcaaagatcttctgctaaataagccagccagcacaaaatcgtagcacagggtgtcatatgacacgtgtaacgattctcttgcacttactacaccagccgaccgattttggttctatagacctatattttaatgacaccagatgttgctagtgatttgctcattacaacaggtgagcctatgattgtaattttatgactgaaatacactgtcaaaatttgctagtaacagcacagagtccaaataccaggctcagtacacccctcttggtgtgagacgagcagtcgcgtctgttggaaggcttctggaagattcatttggctgcacaggtcatcacaacatgtgagttgtcattgcacatgttgtgcagtatcttgggctgaccttgcaactcttctgagtttccataaggccgctttgtataaacataccttgttgtaaggtagattttgcgttgattgcaatgaccaagtctatcgacccagaagcacaagtcatctgggatgctagctcgtttggtacatccattgttgccgcccaggccatagacagcagacacctctctagagtttgtcccatgctacaccaatgtggcctgctggaggttggcccaagtaaattgatctggcaaacagattagtttccaaagtttgccttattgactagttggacaatatcattgacatagaattacaaggttgaagtgagggaatgaaggtgtggtgcagaactaatcaatggacctcggcaagaagtgacatataacagtagtatcctgagaggaaaatctccatgaaagactatacaggggtgcagttgaaggatatagatgtgtcaggccttggctagatcctctgtacttcacacaggacttctgctttagaatttctacctaggattgtacaacagtgcaacactggtcatgctacattgatccacacgatgaaatatttctttttagcattccttgtgtttggtccaaggacctctccaaggacttctcctgggagtctgtcatataattgatcactgtctaggatgacagtccagcatggcagatcaaaagggtattcatgattttgtctattgtgagcggtaacgaagataaagtggattcacctcacctcttgctcctagattacaagacaaaatgagatgatatacttgcttcgattcattgggcaaagggagcaagcagaaccctaaagctgtaataatgtgctagtggtcatgagctgagtaggagtgaaatgtagagcttctcgaagcaaataaatttgtcagcagcaaatgatgtgaaaggcagagcaaagatagtcacttgttgtttccttgaacaggcatataccttcaaatttactgaattgaccaaatgcactagatgaaattcaggggttattggcacatttgcagacaatttctggaggtaaggtgcaatggtggggggtagctagatgtttcaacaacaaatgcaggactacgatagtccagtgttggaagattgcacactaaatacatcttcttgatccccttcaatactgtgctgcagaaactgtctcccaatgcatggttcatagatgtcctacaatatgttagggtggagggttccattggaaggatccaccgggtcagtaagcaggagaggggcaaaggtaggggtcatcatgtataagtaataagggatgcctaagacatctgtaacattgtagtataatagaatatcaacagacggactttcactcggggcatccccttggagacctcctccggcgcatcacgtgacacacgctcccaggtaggccgtcgtctacggcctgagcggtaacacaacgacctgtgagacactataacacacacttgtttgcgcatctttccctaacaagtccccaagaatatcatgtgccactggcgacccaacactgtctaccacacttgtaagcaaaaagaagctcagaaattccttcctttctgattccgttcagtgcttcctcagcaagacaagtttttgaagcaaaataggcttgaatacttccgaggaacaacatcctggataacatcatctttccgcaggcaatctcgagcgcaaggagctgttgccaatgattaatcgaggagcggtactactgttggctgcacacttctgagcatcactagtctttcatatagtccgcagtccgcgaccgcaacattgaaagacgaagggtggtctttaggcttcctctcccaccgtccaccttcggaatcctgctacttgaatggcgagcgccctttccgtaccccaggattgaagtacttctttcacagggcgttgttccccttgaaacatcataaaaggttgatccatcaagtaaggcggggcctctccctcatctgccccgctctcctcagagatcgctgaatcctgtcgtgaaatagcctttgtggggaagccgacgatctggcggctgatgcttcgcgcaagcttttgtaggtcgacgcccagcgaatcttcgctgccgattctctgcaggattggccggctctggtcggtagattcgatagctaggatactcagggcagctacgttgccttcgttggaagagccggtagatccatgcacatacacgccggggagatagaatggctccgttctcctgtcagatgagagcgaagagctgctcatcaacatgggtggcaggggcgaagagaaggagacagcgcgcagtagctggatgttttctccagtctgagtgatggcagctcgtacagcttgagagacggtctgcgctgaggggctcgtcgaagttgtagattccgatgacgacaacgacaaggctggatccaacggaacaaggggagcactttgcaaatcctgtataggaaaagtgagcaggggatcctgcacagctaaagccgcttgctcggcagcttccgtctcgggagcgtccagaaaagccgcagtcgatgtgacatcctgcacaagcgttctgaatacggaattcctcgagacgaaatcagtctcgcaacgaagttcgaccatggcagctctagtgcccatgacagtgacaccgatcagtccctgagtcgtggatcgctggccgactttctccgccttcttggccccggccacctccagatctttttgtagccagtctaaagccttttccaccgaatttcccgacgccgacagcgcttctcttgctttggagagtgatatcgggttgatcttccgaagttgagccactagagcgatgggcaccttcgagacgtcggaaacgcctgttgaggaagtgaattttcgagtgaattgcatggtacacgttgttgaccccgccaagttgcgggagaggagatagggtaaaagcatggtaccacgtcgaccttgcataaggctgtcaacggttgcggaaggaaggcaaggtggccgatgattcctcagtccactggatataaaatggcgagactggcggagaagctataacgcaacgatgtagtggagaagccgattgcgcgtctgaacagcgatggtccgtagaatagcaacttcgggttaagctatgtacgcaacagactgtatggcgtattatcttcttaggagcaatcttaggagtggttgatgtaagacatctagacagttgtacaggtagtatgaggaggattaaaaaatgtcgttgagcccaggctcgcgtcacgtacggccacgtccgagcacacgcgtacgtttgagatctgagatgactgagaccttcactcagcactcgatcaacttatttcacacaagtacacaagtatacaagagaagcaacgccccgcgatcgctcagtttcgtctcttggtctcttgtgattcacctgcgaattgtcaactggtcaattgagtgcggcatctaagactatcaccccccggtatggacccagatctcctgtccccgggaaggacctcatggcgagatccacgcaaaatccggacgcaggccgagatacataaacatctggcgctgctctcgcagcgcgagaacgagctctccttggccctcaatgaaatcataagcaacagggctgttcttgacgacaatatacggcggctgcatacactggtacccaaagtgcaatcgttgcagcagcaggtagacggcgaggtggacgagactcccgccggccgaggcccaccaggatctcatcatctgaacgagagcgatactaacggtcctcagatcgcgccagtatttgatgaattctcggaggaagatttcgaagaggaagactacgggttaatcgagcgagtccgcagagtatggattaccagcgagcgagtgggcggcaaagtccgcaaactggacgtggaggtgtctcgggtcaaggaagctacggaacgagtacaggaggtcctggagcttagggttagtgattgagcaattttcgctgtagaaaaatttcaatctaaagtgacgtatcctactttgatagagcgcgctgcaatcgctcagggacgccattcccaagggtgactgggaattggcgactcgctgttgtaaacgtgccatggatgttcgagcggatgtgatcgagtcggcctttgctgcgcgagttatagtaggtcatctgcttttgaattgatacgccatccattgttgaacagctcgtttcaattaccctaaagccaacctcttcagatccctcgccgccacctcaggctctacgggacctcaggcaacagcttttaatcaccttcgagcgcgagtttaatgacgcttcgagcaagaaagacgaacaggctactagcagattcttcaaattgttcccgatgatcggtgctgaggtgagccgacacgtggccaaaggtggactggcgcaaaatcggaactgaaccggctaattttacaggatgagggattggcggtatatggcaatttcgtcactggcttagtgcgcggcaggaatcccaccggcggaaaacgcaagtggatctgtcaattcgaaatctatcgctttatcaagccgtactgaggaccccctcttctatgtgtgcatcagcgtcatcatcggtttactatatttctcatttgacatccctcttagagagcatcgctctgatcatcgatcagcatcagaacatcgtcgaaaaatattacgggcaaggcaaaatggatgtcgttgtacaacgacttcaggttgaagccgatggattctgcaagacgttggtcgaaggctgggaagacgaacgacgggttggaagactggtgaaatttccacgccgctcttttagtcagactgcatcgccgggctcaccttgtctgcgccgacgtatcgcagatagcggaactacatcaaacacgtttcgactacctcgctaatcctattcaaagccacatgtctccatcgcagtatggtgcgaccacgtctgtgcaggcgtctcttacggcgctctctcaagcgcagcatggtttggcaaacctcccgggtgcagcaacctcgctactcgctcaatatgcagggtccggtccaaagaagcccattcatcaggccgatggagcgcagggcgaacatgcagaaggcgttgtagaggaaaacaatggtcctgatcctcgggatgtggacagaattgttggtgaaatgatcactctgagtggcaggtgggcattgtaccggcgtttcgtttggaatcgattaaatgtgagtcggacccattgcagatgcacgtcttggactacaaaaacactgattgatgccactcatcctgcagtccgatgatgaaggggacattgttgcgatcccagacgcagaaaaatctgatgagccggcgcgcacgaatttcccaactatcgaagcgattgatcagtctgaaagtcaacgggtcatcacaaatatgcttcgcacatattatcaaccgcttgaagcatggtacctgaggacgagcattgagaaggtgaactcaattcgaggtgtgtcgttcgattgtcacactaacgcggacatgccttgaaaggcccacagaatggatacgccagatctgagtgatcgtccgcacgtttcctctgtggtagacgacgtcttttatctgctcaagctggttctaaatcgagccctcgcgtctggatctctcgcaactacccgtaccattcgagagggcgtgagcaggattatcgagcgtgattacctcggggtcttgcagaagaaaatggatgccgtctactctggcggtggagccgctatcggtttgcttggaaccactttggcgggcgcgagcaaagaagccgaaaaagaaaagcgagaaaaggagctcaggatcagctacagtgtgaacttcatttcttgaacctatcgacaacctcaagtactaaaactttgattgcatcggcaccaattaggtgcttctcaacgacctggacctctccgcgacttatacagagagacttgtggacgagataatttctggcggtctgacggaacaatggttcctggagacggaggttcctgtcgtgcaggccgagttgaagaaccttattgacatcgcgacgaaactgcggacgatcgccaaggtgagatattgagtgattcgactggagaatctgccggtctcgctaatccagcgcgcttccatccttcattctgctgctatagacgggtatcgaacaactcttcaatcaactcacgcgcccccgcctcagatccctgctggaagatgtatacaaagggataacatacctattggacgaggacgcatacgccgatgctgagaatgatgatgcagtccacaggcgcttcatcagagggtgggagcctctcatagaagggtatcgtgtaaggcgaaagtcggcttcagctgcgcggccatcatcccattctgaaatattgcgtcttgatcaggcaagttttaccgataccaattttcagattttcttctcgatgatggttgaagtcatggtccggccttgggagaagatggtgttaggaatgcgatttacggaagtaggtaacgatgtcctgatctgggagagaccatacgctgattccgagacctgacctgtagctcggtgccattcgcttcgatcgcgatgtgaggtcagtagcgaattatctatcgactcagaccgagttcggaggtggccgggagaaattcactcggctacagcagattgcaactatcttgaatctcgatccagtaagcgcaaggctaatattattgcctttcgtggtcctgctgagcgtatatacctgactgcctcccttcaggacgaagatcccgaggagttctacggatcatcaggaatcgcctggagattaaacaagaacgaatacgacagtattgtggcgatcaaggtataactacgttctcaaacagtgatatgtttacatagataagctggctacgaacggctgatcgcctacacgctgttgatctcctttcatcgttatgtttcatggagagaggcgatctatctgccaacgtgattgtccatcgccacgtgtgtacctcaggcgatcatgcaagcgcgagggttgtccgctccagaattccacctcactgcagccagccatggaaatgagctctagtcagcgagattttggctgaaacgtcgcgacccgctgcttacaacggtacgattctccacccgccccaaaagtctggacagtcaacctttctgccctcgaatttcttctcgatttgcttgacgcgatccgcaagtatgagctcatcctcgaggatctcgctctgtcggctagcccaagcaccaatttgactgccacgcgggcgggattcgaagtactcaacactttccgctctcgagaccttctctgctttcccgactaccctgactgaacgggacaactcccgccaataaattgcgatagacgcgtaaggattctcaaccagctcccgcgatttgcgagaagagtagttggtgtagaacacgaagccggtgctgtcagcctgttttagcaagacgacccttgccgagggaattcccgaaggcgaagcagtacagatagtcatagcttctggctcatgtacctgtggctggccatcttgaggattgagggcagaagccagccagtgctggaattgaaccatcggatcgggatctacttcgctcgagcgaaggcgaggcgttgtgtactgattatgaccagcgacttggatcttgttggctttgagcacatggtcatcgtgtccagcatccattgcggcggaagtcggtaaagatggatcggaagcgacggcatccatacttaaagtccgtgctctgatagtgatcgggatgaatcggcggatcgagtaggcttgcgcagcgatgtagcgagttcgtgtgaaagatgagactcgtggctttgcaagaagcatgcgagccttctgtttcggtttgatttgtttttgcaaaacactctgcaaggatgaaggatctctgctgtaaatcggttgtttttatcagctggctagaccatcattatcacgatccatctgctcgtcggccgatcgattcgatcagcgatcgttcagtcgttggcacggacgacatgtaccggatgcatattgatcggaaccaaattcgatacaggttgtcgaccttgatgagtttgtgtcgatatcctgacttcattccttcaccttgccatctcccttctcgtcacccatctttgtttgccaatcctctactcaccctaattatctcgttatcatggccaattctacactcaaaggatctctggctatccacggaggaaaccctcaggtaggtctaagggtcaagaccatatgatagtcccttctaggttgacccggtctattcggtctcgctcttccagtttctgatagagaaagtcattagagcaaggatatacgacagcatatattggaaagagcaatgtttcgccttgacaggtgcgtctgaggcttgtcacatccagcgtaggcatcttaacgtgggcggttgaactaaatctgctctctcgctgcacccagcggagtctatcattgacaaggcgatctccctcgattccgtcggaggcgtatatggaaatcaaaagcctaccgaatttctcagtctgactttgaaattgctcacgttacaaccggaaagagcgatcttgcttgagtatctgagagccgaagagttcaagtcagtatcaaatattggcatataaaccgttgctgtcccatactgaaagcctcgcataattcctcaagatatctgagagctctagcagcattctatatccgcttgacgttcaagccatttgacgtatacgaaattctggagcctttgatgaaggattaccggaaactccgaacgcgggacgtcggtaagttgagtgcgcccgggatgacttacaggaggctgactccgtgacccgtccccacaggcggataccatttgacgtactttgacgagtttatcgatcaacttttgacggaggagcgtgtttgcgaggtcattcttcccagactgacgcgacgagatatattggaagagactgagggcctacctcagcgatcgagcctcctggtgagcctcaatcttgtacagcacacggttcttgagtgagatacttgactctgacacgagaagcttctgaatctcttcttcaggaagaaacgctccgatcagaccgaggttccagatcgccctcacccgtccgacaacgaaatcgctcaatctcacccgatcggcagtcggtggcgtcatatcggtcccgatcgaggagtatatcgccagaccggcagatggactttgtgcccagtagaacacccagcgaagcatacgcgagcgaaggttaccgtagtcgctcacctagtatcagccccgacagggatttgggcaccagcaatgacatggaggtggacgacgcgtcaagcttcagaagtcgcagtcgaagcgtttcccaagatagaaagcagaagcagcagtgtacatatccagtcgatctcatgtcatagtcgcctgcatatcatgtatcacaatgacctcggaagaggtatcgctacaaagcgttgattggcattgacgatcagagtgcctctctttccgagatctaacctattaaatggccgaccgctctattataacaatcagaagagggatactcccatctgtctgccttacagcgggttgtaagtagtagttgtccgggatcgacatatcaccataggccatgcacgacgatatgtaaacccgttcgtccggagcgtagatttacttccgataacgtgctagatctttaccagctcggaagcaaatgcgtccagcacggtttcggtaggcagctagtgaagggtgacaatctgcaacccgatgataggagtggtatgtatgtgcacgacgacatattcagaacttacatcccggccataacagctgaagtcaacgttggcaatcgctcaatctcacctcaaacatgactcgtctggaagagcagaagcaatacactcccgacaccttcaaggtgctactgaaaaagcttacccaggccccggacgatttcactgccgatgatgtggctcaatgctttcgtcacctctgtaaagtcgatggaattggagctacagaagcacaggtaagcctcgtatcatcaaccccttcggcatcagagatcaatttttgatcccgaccgattcaagatcgggtccttcattaccgctttgacactttcgggtctagatgcctcgcctcaagtcgtcgcagcatgcgcccaagtccttcgggaacattcggtgcaaatatcctcatatctgacggataatacgactggcgaagcggcaacgacagaaaacgaccaggacgtggaaaggtgggattttagcaagacggacgcagtaggggatggctacacgggccttgtggacattgtgggcacaggcggcgatgggttcgacacgtacaatgtgtcaaccacggcggccgttgttgtctctggcacaggtctcagggtcgccaaggtgagagttctggggcacttactaggttgtaggatgcctttagatcatcaagcaagctcaccgccgtccctaatttacttgctgtgccatagcatggatcgaaagctgccacgtcaacatcaggatctgccgaccttctcatgtccttaggagcttctttgacgtacccgccctcggccttgccgatgcttctagctacttcgcccttcctgttcctcttcgcaccccattatcatccttcgctagcgcatctcgcgccgattcgtagacagctcaacttcagaaccatcttcaatgtcttggggcctcttatcaatcccgctcgccctcaaaggatggttcttggcgttgctaaaaaggagctgggtgacaccttcgccgaagtattgaaacttcttcaagtggaacgagccttggtagtctgcggaaaggaaggtttggatgagatcagttgcgagggagaaacctgggtacgtattatctctatgatatccatcttcccggggagctcattctcgtattgtttcagacgtgggaactccgagacggcgagattacaaccggttccatacacccaacacgggactttggcctggcaactcaccctatcagctcagtacgaggcagtactcccgacttgaacgccttaacgttcagatcgatcatcgaccccgctctcgatgctcctccacacctgtgcgcaccggcgtcagcggattccccctccatcgactctatcaccgattatgtgctgttgcaatcagctgcattactcaaggtatctggaagggtcgagagctacaaggatggagtagagatggcccggcaaagtctcgcttcgggcggtgccttgcgggcttggacaggctttgctcttgtaagccaaaaggcgacccatggacatgccggagtggaggatgatggtggagaagctgcaaagggcggctcggttcccgcttggctacacgctaagggtgacttcaaggagaggaaagacgtcaagtagatcattcccttagatatcgtagttccatctatatcgatcatactgaattaagccatagatgctaaatcgtaagattatcgctcgaagcatgagcgatgcgcctcgaggcgcgatattagcaggcaagtaagctgtgcacggggttccagctgtcccgtacttcgcacgcaagtgcctcttgttgctggggattctacttggagatcgaaagcgcagcgaacattgggttatcttccatcgctctgctttccctatctcgctgttcagcttcattgtatggtgaagagcacaaggagtaatctaaacagattgacacagaatcgctgcatggcaggttcgggacactagctgggtccacaaaaggtccctggcaactttcctaggcttctgggctgaggtacagagtcaacagatcaagagcatagtgcgtccttatacaacgagaggagtcaggccaggttctctcccctccctaacgtagtgatttgcaatgacaggtgtacaccccgatacagcccgtcgagggataaggttcaccaggacaggcactccattgacgggactctgatgcgagcaaaaggagtggtccgcgacggtcagtccggtgtaaaaagtttgtgactggtccttaagcgtagtgccgtccgacctttgcgggtcagcacgggtccggaccgaaaggggacaatatacaggtcgtagcgcctatgaggatgacgtcttttgcacgagtgattaggggtcccagttgctccggacctcatatagcgctaagatgatgacatcgcacgtgaaccagacttcctcagttgccatggatggtgagactgtcttagaaccgcttgcttcccccttacaatactccgaggcgagggacaatggcgcaccgcgggccacatttcgagacctgcctgacctaaggcgaagaccttagcgacggatttggcgaccacgggtcacgtcctgatcgtgaatgaggcggtcgtcctgacatattgctagtgatgcgacagtaggcaattcacgcgccgatacgtccgacggtcaagaaggttacgcatgcgacaaacagcaagatggccagtatgatcgtcatcgatccttccaatctgccacagatgagagtgcaaggacaacgtcagaagcagagcggatctcgctcagcgactgcggctcacctccagcttcccgcgaaagcgcgtccatcggccaactggttgtgcgtgtggctgtagccgtacgtacttgtcgaaagaatgaagacgcaaatcgcgaatacacatatggcgagcggtaccgcaatgcgattttgttccaacaatgggttggaattctgaggaacagctttgcttatatcgccatgcggcagaactttgtcgcctactgattcgcctggaaggtagcccagaatgctcgcccagttctctatgctctgaccagtcctatcgtctcgacggtacaagcttgaaggtgtagaatcggtagccatggggtttccgccctgtgttgagggcaaattctcgtttgcgaaccgaaatttgagaagcaaagcagtagtgactgcgagcagaccacagatcatcctgatggatgtgagaaagtttctttcgttggctgagacacacgaacgtggcgtcggaattctcgcgtaagaatagagtagatggtggacatgattcggaagacttgccggctaaatctctcgggttactgaatcggttgtcgaccacggctatcttggggttgaagctcatcgtcggcaagtgtttggaaggcatcatcgacgggtcggtcctttccgacaggtcgcttcggtgttgtggatggaacgtctgtgcgtgttgaagatatgattatatatctatcttgaaaccagtagtgtagccttgtgattagtgtggtggccatacaagtactgcgatctgtagatctgaataaatactaaatactctactgactttataacatgagatggtatggatcagccatgcaaaggacctgcctgtgatcggatgtaaataacagctacagccggaagtaacgtgtatacgtcatgcatgctcgttgtgacgtaattttcaaatgcttccgagccggcgttacaatcaaacctcgggtagatctgggatctgtcagagcccagatcgacagatcgatgatattcaatcatgaaatacaatatagtcttgtccagatccagcttctcagactagctagactgcctcatcaccggactcatcctgatccaggaccttcagaacaacccgcaccggagtgataatcacttctctttgcctatggagcctcttgttagcgaaagcgctacggaacctactactgtcgatcaggctgagaagcctccggttgaccccaatcaacagccgggttcgctagacctcgtcgagctgcaaggacacgacagccccgacggtggagatggaacgatagagcttcacgatagcggagatgaagatgtcgagaagcaagtcatggattacgaagaggcccgattacagacgattcggtgagacgctcgaatagaacatgatggcctcataggctctgatactagatctgctcgagatagccagaaccaagaattgcttgcgtctcttgggctagatcggttaccctcatcaaagccaccatctccaaagaaaccccgtttggacaaggtacttgcaaagcctagaacaaagccattcaaggacgtcgaacctatccgtcggtcgggaaggatcaaggctctaaaggacgagatcaaggtcgatcccgagattctagatctaccagacgatgaagacgtcttccggaggggaattagtcgacatcgccagactactgggccagagttgcctaggggcaagcgcattgaggtgcctagcgtgagatacgcagatgaagcgggccccatgtcaaaagaccgcttgaagcgaaaggcatcgaatctatccgacgatgatcagatcgaagaggatgattattcgaagacgtactcgaagcctacgagggcgacagatggtaccaatagactgtcttttcccgggagattcatggatatatttgagcctaatgtcacgcctgaagagatgttgcgtggaggggcatttgcgggtggatatttcaagtgggttgacctgattgcagtttgagcaaagcgagttcctgatcgtgaaactctaaacttccaaatagggatgactactctaacgtattgaaaaagcccctcgtcgcatcagaagatctcgcagaactacctgcgagctacacaaaaccgagcggcgatttctcccccgaaactcatcttacctcgaatgtgcaggatgcaacggtcaatcggttcggacgactagctggacagggactcaaagagtgggaaaaaagcggctggatatggaaaggagatcctcggggctggatgcagtggtatctccgtttctacgagggccgcagatgtcaggatgatacaagacaggtcatgcgatgtgagtaaactcatctcgtcgatccagagatgaacgttttagctgaaagagatcctgcgcagggcttaatttagcgggacctagaggtcgcttctcgcgaagccttatgaagaagattgcagcagaccccgggtctggcggggccatcgagaagaacacgtcggtcgtcaatgaggaagtaggaacggttttgagacaggtttgttggcaatggggttgggagtgcacgcaggcggaatgggcaaagcggatagctgaaggcaacatggcatgaatacggtcgatagatgcatgatacagctacgtaatatctggtgcgacaagcgaagtgaccttctaattagcatacgaatcgccaagatgatgatgaacctttcctcttgaaacccactgtattttggcccaccgcctccctctggcacacaccaggtaatgtcctgggtaggcgtcttgatagaacatgtcttgcactagaaacgaccgatcgacaccggcgacagagtgagaaatagcaaaaccgtatgcagtcgatcgcaattgcactcacgtgaatacagttttgcgagttgatcacaaacttcttcccgctggcgtcggcagcactaccctcggcatcctggtattcgtatacggcagctgggcatgcccgtccgaggaggccagcgtagtctgcagacgagaaagatgactagtcagagattgataggcgacgggtcaaatgacgggtggcgaattcaccattgacattggtctcagtatgtcgagcccgagcgccttcgtccttgggcaatcgcaaatgcaccggttgatcctcggcgtggttcgtccccgtcaagctaacgcttgtcagaatgtcaaagctcagtttgccatcgggcggagggtaatcgatgggctggcactctgatgccttcttcgtcgccgcgtgatcttcccacgtgttccgcaaggtccaaggtgtccttcccttcaagatcagactgtcgacccccgagtaggccattccgccccatagaccgagcgggttgtggaaagatgggcgcaaattgcgtacctccttcaattctttgtacacccaagattccttgaaggcggtttcataaggcgacatgtcgacggcctctcgagctgatccctcgaggggttgatcgagcgagttcttgtcaatctcgacctcgttatctgggtgaagtgccttataagccgtctcggctgccatcatccccgatttcatggcattatgcgttcccttgatctgacgacgattattaggggaaataagtgaaggtaagccaagttgtgtcgctgaatgataactcaccttaggcacattcaaaaaccctgcactgcaacccaacaaagcaccccccgggaaatgcagcttgggaatgctctgtaaccctccttcgttcaaaaccctggcaccatatgcgatacattctcctccttccagaagatcagcaaaaagagggtgatgtttcattcgctaaaggtgcgactttagcctgggtgatttatagcgactcaaagctagggaggaatagtctcacctggaactctttgtaaggactcaagtatgggttctggtagtcgagtccgacgacaagtcccagactgacaagtccaccctccatgtggtaacaccaacttccaccatatgtcttcatatcgagcggccatccgagcgtgtgcgtgaccttcccgggctggtgtttctcgggcgcgaccttccagacctccttgattccgagtccgtatgtttgaggatcacagttggcccgtagctggaaatgcttctgaacgatctgggacaaggagccgtgtgcgccctcggcgatgaggacgcatttggcgttaaactgcatgccgggctcgaagctgtccttgcgcttgccttgccggtcgagaccgacgtcacctgtccgtacacccttgactgatttgccatcgtcagagaggactaggctggatcccgcgaatccagcatacacttctacgccgagctcctcggcttgctcccctagccacgccgtcaagcgggacagactgaggatgtaattgccgtcgttggacatctgaggaggatggggcaagggaaatgacgagttctccgtgaggaagcgcatggaatccgaagttgcgggttgacccataggagggggattgggcatgttggcgaaatcggggaagagctcgttcagtgctcggggttcgatgaccgctccagagaggatatgagagcctatatacgggaagcatttcaaggatgtggcttagctgcaattgccatgtgcaaggcgtttcactacggacgcaccgacctcgccacccttttcgaggacgacgacccgaatctccctcccttgctcggcttcgagctgtttcagacggatggcagcacagagaccggcaggtcctccaccaacgatgcatacatctacatcgtcttctgcgcgctcgacctcttcctcggcggactcctctgggattggcgaaacagggtgatcggtcaccgtggcaaagcccctgctgatcgcgtcaatcgaggcggtccgactggcgctgctgttggtgagccgggcggaagacgaggcggtgcttgtgagcagcgttcgggctagcgagacggtagatgttgatgccgctggtagtcgagggacggttgatggggatcctcgcaagagcgacaacgtagacctcgcggccgatcgcgatttgtgcatggtggtagtgaaggagctgttgtacgccgagtagctcgaatgcaatgttcacgactttacgttcaactcgtcgcctcgagtgtgattttgaccttgacgtggtcgggcggtgaagacgtggagagacggacttggagaaatgttgacaaggcgggcctctgggtgtgtgtatatgatggctcacggggtttccggttaatgttcatgcaatacatgcaacatgcaacaagatgctgctcttctgaggcgaggcacagagggggaggcgacatttcgagattgattacggcatttctgattcagtctcgcgcttcggccggaattgaccgactcgtcattggctggatcaaatccgaaatcgaatcaacccggccagccaggtcactcgcgcactcatgattttaccgccgtcaagaccgagtctcgcgagtcgtcaatagccgctagccactctagccaagctagccatgctagctatccaaggtctagtgacgaaacgtgatccaaaatcagagaccggtattcacttgacaaccggagggtcaggacggacggaacgagaaagcccgggaaagggtcaggtgacattcggtggagtgggctcgagcgaatggtgaagacgatgtgtcgactcgatgaacgacccgcgatccgtcattcccgtcaaggagcgccggacgttgacttgccgaaaagcatcggaacattcggacaaacagaaatgccgacgatccacactgcatttatataccgcagaaagggctcagccaacactggccatcatcgactctttagaattccttgctttgtctcattcatgaaatagcctatgcgtatgacaacctgatttattcgacggatggtgacttgaccctacagacggcagaaccacaacatgcggaggcggctcacgcgcgagcctcgactcgaaacgcatacagaggaggacagaggatcctcgactctttttctcgaaaaacagccggaggactatttacaaaacgtatcggaagtggatgtctgaggtgcagcagcaagtgtcagcaccctgttgaagattatcaacgtgatcggaactgcagaatcgcgactcactctcgttctcggtcatacccttcataccgttgtcggcagactggacagggtcgggttcgccgtaaaccctgttgcggcgcttgttctcgtagaacatctaacaagcaagacgacaggttatcagcgctggtaatcgtgggaatgttggggtctcggttgcgcaactcacgtatcctcccaagatcaagtggcagatggtcttgccgatgtatccacccaacatggccatagcagcggactggtacttgggcgcctggttttcgtagacaaagctgggaccggcagcgtttccggcacagtagcagatgaagactgcagaaacgggatccacccgtggttagcgggctcaagtcgataggatcgtcgcgcacatgcctgctactcacccatggtggaagtgacggaacgctttgagtaggatccaatgttggaagagatcatgacgagaccaagggtaaaaccgatcgattgacagttgatcaaccagaaaccaataagcctaggccaggtgtaggccttttcgtagggaaggaagacctaaatgatggcaatggaggatcagcaactgtgacgtgtaagcgagagcggagccaatatcgctcaccatgaggcccgaacccaagacactgttcgacaaaagaggcaagacttaggggacgatcaagacgtcatcgcaacaaaacaagcagactcaccagatcaagttaccagcggtgaccatgatgatacgggagttcttgaacttagtactacaaacaagcaacaaagtcaacatctgccttcctcaacagagcgatattgacacgactttactcacgcgatgataccagcgatcaagagcgaaatgacttggagagatcgaccggcacagtcgagaagcgcagcattaagagtgctgaatcccaaaccctctaataggcgacaagggaaacgaaattagctttcattttctggacgactggcttcggttgttccgactcactgatgatggggccagagaagttggctacagacgcgtgcaaatcatatcaggaatactggactcgtaacatgtcgatacgaccgggaaggtactgactgagtacaccgttggggacggaggaaccgaacatggcaagggacaacatccaagccttgacatcggtcagcgcagagagaccctgcttgacgttgaaggtggtggtcttgataccagtaccgttcttggcaacacgggcgacagcgagggacctgaattcgggcttgagccatttggcgttggagggtccgtcagcgaggaagaaccagagaacggctccccagacgatggtaatggctccctaaaatcacaagaacgggatccctggtcagtttggaagtcatacttgccgcatgaatgagatccggttcacccaccaagatgtagaagatgagcttccaacgcgccacaggctcgtcgctcaatctgaaaaccggaagaccgggaattttagcacgcgtattgacgtatcctataaaacgcgttgtcccgtgacatacccttgaataccagcggccatgagcgctccgatcataccaccccaaccgatcgcggagtaccaaatggtctgtcgcctgtttgaggaaaccagatttagatgagctttagagactcgcgttgtcgcgcaatcaaatttcgacatacaaaggactctcctccctggtgtaccagaacccagtcatcaagctcaaacctgttagaagaatggctcgtaagccatccgattaggaagggggccgggcactatttgcataccaggagtgacggaactctcaaagacacccaagaagaaacgcgagaccaagacgtgggagtaattcttgttcctatgtgctccaaatactcagcaaacggggtatcgacgaaatagacaacaggagaaaggaacaaatagactcactcgaccatggtgataacacagattccccaaatgaacgtagagacaccgaggactgtccagcgggatatcatcaacgggtcaatgactcgatctgaactggattgagactaataaactgacctcgtccggcagggaaccttccgatcaagtacgcccaaggagcctgggcgactaggtagccgacatagaactatcggaaatggcgaagcaaaggattaattccccccccccccttcggaacataagcaaccaattctctacttgcaatcgatgcagcggtgctgaactgctgtcccttcagacccatggctttctccataccaaataccttggcatagttcaaggcggttttgctaagagcgatcacggtcatgagcaacatagcgagatactcgtatgcagcgatggattaactcactccaagtattgcaacgtcctgaatgcagctgtacatcagccttgatccatccatgtgaccgccaaaacagaatactcactgggtcagcaaaaagagaggcaagataaaccaatcgatcctcctgagaatctgcttgttctgggcaggggtctatggatacgaataccggaagtccgccggtcaacacgacacatgacaggaagcgcagacctggggcttacaatctcggccatgtgtttactcttctcgtactcggcggtaccgacgttaccgccggtgtcctcgtccccttcgagaatggttccgggtacattgacgcgctcgcggtgatcataaccgcccttctcgtggtcgacggtgccgatgtccgacttggacaggtcagtctcctgacggtagagttggggttgctgcgcggacatcttgacaagggcgtgcggtcaagttcagctgtattggtcaagatctttccggaaagatcgctttgcaatactggaataataaaaaatgtagacggatggaacaggcctggcttcgtgctattatacctctttgaccgcatgcttgtctccgatctccacaaccgacccttcaatgaaccccggggggcaaactggggtcgtggcgtgtcgactaggtggccacggagccgtcttgcagtgaccgataagatattcgaaatgtcctggatgcccagccaagggttgcatagggcctcaccaaagggctcaaacagcaaacaggctccgtgacccacgaaatttcgaatttcagaaaacctcccgcggttgctggagcgcggctggcagcaggcacgcgcacggaatctttctaggtactatatctggctctaaatcgcccctggtcatctagcgcgttcactcgatacgcggttccacccgaccctccagctcgaaccaccacggacgactggcgatattcgggctggcgtccagttcggcgtccaaattacccgaggtctcgcagatttcatcttacaggtcgggtggacgtcgatcgtccgggtcgcatcgcgaacctggatcgccaagaggatcctgtgctctgtttcacgaaggatattcgaaaatgcgcggaaccatagattcccgcataatcgttgatggtacaaagattcctatggctcaaccaatgagagggtctcaagccgcacacagggtctgtgaaggcgctctagcctgaagccacgcagtcggaatgctgcggcgatggcatgcgatatgcacgcacacaggtcgttcgtcattattgggcggatggctagtcgttccggagtgggcggaacagtgaccgcaatgggacgctgacaaagatcattccagcgcggagcgaaggtctcgactgcttcgaaacgggcggaatccccaatatcgtcgacgatcagtggatagtatcgttgcgacttgggccgctcgcgttgtcgtcagcataatcaacacgagcttgtataatcgatatgactccacatgaacatgttccaccttgcgcctgctgcgaaacatctaatttactacaccgtccagcgaagttttggaaggaatggctcgagcaggcatcatacacgcgactatcaggagtagttgtgcgtccaaacatagtgtccctcagcgatacatgggcctcgataatcgcaccaaagcttgacaaaacgttccaccgggcagctatcacgatccgattcgcatctagtggccagctcccattgtagtaaggattgaaaagcctcagattatcctctagcatcatttcagcgataactcacgaaacaggaacgtctcggatctcagatctcatggactagccgctatgtctgcttccacggcagctagagcgccgagcagcagaatatcgagcactgcagacactgtgagactcagtctgtcgagcctggcaagcgtcagaccctctcgtttcctatcaggacccgatcaaatacaattggaacttctcatactatacgcgaagtaatcgaatcgtcgcgtattcccgcgcaaagtttcggaacggtcgacctgaagggtcaagcaagaaatacggcgttgcgcaggaaagggtcatgatatccgtacgtactgagcgggagctctcgacgtttcgatgtcgcatcgaaacacactcgaggtttgatgtcctttacatccaccttctatacccggctcttcttacgaatgtggagccattgatcgcgaagatcatggccggcacctttggcttgcaagctcctcggcatctcgacattgatacaccgattgttcgccccaagtgttcgctacctttacagcccagggtaccagtgtcctcgggaatataccaacccgaatggcgccgaaccaacttcggctgagcattgaggccgaagtaatcagatcgtctgaggcaagcggcttgtcgcggatccgattgtctgacaccatactggtaagctctctgccatcattcatacctgcaccttgcctctatgaaccaccagcatctcccgcttttcgtgatgggaacacgtgttgtttggagctttgcaactaccgaaacgacaagctgagtttaacatgggatatacttaccccgcaagtatcgtctcccacgaacataatcgaacttaagacgcttgatgccacccgagaccttcatgtgaggaagattatcatctcaacttccttccagtgttgtagtacagatcgatggacgatgaacaggcgatataatgaaaacactcgacgacctggcggatctccgcatcatcgtcaataagctcatattctggtaattcagcttggtcgcggctgaaaccgcgctacctgcatcatatcgcgcgaaacgatcgtggcgggcaatattcgatctaccgaaattgcaaacagcaagtctgaaaagcattatcacaagcaactcgctctccgttgtctcatctgaaaggcctgttaccaatcgtggtagagctggccttgaacgaatgggagtcttctggagacatcttagcgcggtgcatttgatctctggcgatccttccgaaacatgctaggatggctacggggaagaaacaaccagagccggaccgcagggcgaagtattgctgctcacagaattctggtccaagatcccctcaacaaagccttgatccaaaagttgccgtcgagccggattgaagacggagccgacaggcataatgcgcatgcgcatgttccgtaattcgtctgcgaaacgataaagccatcgctgtactagatttatgctatcgggctagccgatggtctacatacatgcgagctgtgatgcgacgtatgggtgtgattatacaacagcaaaattccgcactggtaccggtgctctcgatggccggagcccagccttgaaatgtacgatatcgtcgatgatgacattttcttccctgagcttagcttccctttcaccaacagcgaccttggcagtgtcaagatcggctacttgcttgtccaaagcgactttgtcttcctcgctgagatgaatcgcttgggcaagacattcgcgcgcaaacttctggatttctgacaatccaggcgcggttgcgagcagcgcgccgagatcctcttgcgacacaggaacttgcttggccatgaaagcctgaatgatcggagtcgctcgagccgggtcgaatttgacaccttggtaggtggaacgcatgtgaatgctgagctttttccggatgggcgagttgtagtggattctggacatgaaaaggtcggtaatgtcttgcttggaaatgttcttggtatattcggcatccctgaagcctgttcgaataggtcaggtggcgtatttagctcagtaccaaggaccgccacgatgacgatcaagcacttacgcctttcaaagtcgtaatagccatcttcaacggcagtccagaatcgcgcactctcgccatgcaagtttttgggcttttcgagcttcttgtgaatgactcccgccttgtgcttttcatactcctcttcggacatgttgcccaaaaattctttcatgtggtccaggaaagcttccaccctcgtctcaaggtagacgctgtccttctcactctggataaggaatcgcaaacccatggtccctgtagaggcccggggcaaggcaaagacaatgtaaccgagctgttccttggttcgcaagacattgaaagcaggctcggaaacgagggacgccagcagggataattgcggtctcaacacgtcatcctgaatatcgccaacttcgcaatagtattcaatggccgaattgacctctgacgggttggcaacctcgatgttccagacgtaggccgagcctgcagatggaaagcgattttcagcgctcttcgaaactatagtctgcaactatgcttgagtccgacagcaggttctcgcgatgctcaccttcagggagcaacatggatctctcgccaactttttccgatgccgtgagaactcgcggcttcagcacagactcgaccatagattgcaaggccaaagcgttctgcaataaagaatgatcttagttatccgcatgtagcgttgtctgcatgggcagatctgatcactcacctttttgtccatgttaccatgtatgagtccctcgatgtacatcctctcgaacatctccttcgcgaatgcatcaacggcttcgggagtgcagactatagcgcccgactatcaacaggtggtccaattattgctgaccatgtgcggcacgtacattctagttccgtaactttctcttgcatggtccacatgtactctgattcggcatagtgtgcgtagtaggacaccagctgataaggctcttccattttcatgttttgccaactgcgtcgaagctgtaggaccaaatcagcccgaggtcttgacctttgccgtgatgggcgactgctactcgagactcacctgatcccggatcaactcgaaccgagactcgtccaccttgaaggatcgcatgagtcccagcatcttctcggtcatggcgggcaacttgtcgttgtatccaacggtaccgacggtgagcgagtctccagcgtaatctagcgaaaactggaggccagcgagttcggcgtcgtaagtttcttctgcgattgaatcgcggaagagatcgacgaagagtcgagccaagaccgtgttacgaggcgagacttgcaagagaggactggcaaagcacatctcgtcattttgccgtgcgtgcttgtcaacgacgacttgcgacttacgttctgagcgacaagaaaacgttggctcgaggaatccagaatcgatcatcctttttgtaccacaacttggataagggtgtatccttgatcagttcaggcacgaccttgggcttatcgacctcgatcttctcgacgtcaaggttttcggggatgaacgcgttcttgccaggcagatggagctccggcaaggtcccgttcaaagcttcatcgatgaatgcctggctcatcttgatccgcttgtacttggtctcatatatcggttccgtaaggtcgaacgacccttcaacgcttggcgggagcatccgggccgagaccgcaatgttgctacgcctagggtccagcaattctaatgatcgacgggtctcctcgacatcgaactcctcaacgagccattgtgatgagatgatcttttccctaggtaccggttggtgcagctgacgcgccaagtccgagacgtagctggaggctccacctcgctcaacgaacctgaagccgatctccgccaacgccttgatctcgttgaaggcttcttccgaaggaggttgcgatttcaaaagatggatgtatttgtagacggcttgagccactttttcgtagttggctgtaaatatcgatcgaagtcaggatccgactttcaatcggccaaaggggactcgacactactgggtacgtacccaatccatcctcggtcaggtcgaccgtgaccttgaatagctcgaaaccgctgcttccgttctgagccccagcacggagactgttgacccatccgcgtcgcttcaagtaggacaagattgacccgggtccctcatggcccaagaaatgggcgaggtatgaggcgggtttcgacttgtagaaatgtcgttgatccgggaacgggaacgtgatctccatcccacgggtgtccttgaccggctcgacgaagacgatgtgctgtgccaagatggaattcttgtcagaactggtggcgatgcacgagatcagcaacgggacgaaatatgactcacgcccatctgttcctcttcgaacaccttgtcgctgtacatgaccttttccttgcccttgtacggcaccttttcaaacctctccctgacccagccttcgagcgtgtctaaggactctttcccgaggacgacgagcttcattcggctgctacagtattcctttttccaccactcgatgagttctgcccgcggatcccggttctccgacttgggtttcgaccagagcgtctcgagagaacccgtgccaaacttgttgtaaggatgcgaaggagaagagaggtgcttctccaactggtagaagcgctatcatgtcgcaaacgatcaagtcagctgacatcctcccccattattgccgcggttgcacccgcttcgagattgcgaatgtactcacccacatgtcactctgcaagttcttcttgtgctccgagttgacggcgttggcttccctctccgtacaatcctccgcaaataaaggctccgagaagaaccccgcgaaccggtcgagggctccaagcagagcgttcggggcgacctcgaagtagtactacatagagaagcacaatgaacttcgtaagctttattcttcctattttagctcgatagcatcgatcgaagcgaactcacgttggtattacacagatcagtgtaagcgttcgaatgcccgttgtgactcgtcaggtacgtattgtacgcattctcttgcggaaacgtcttggtccccaggaacatcaagtgttcacagaaatgggcacatcctggaagattatcagggtcttccaaatgacccacaccgacgtcaagggcagaggcggatttgtctgcgtccgggtcggagatgatgatgcattcgagcttgttgggcagggtgagcaagcggtgcggtcgagtttcggtaggaggcaggatgagagaggttcggatgactccactagcgtcggtgttggaagctgagctgctcgaccctgaaggttgagcggaaggtccagacgagctcgaatagttgctgtttggtcggaaaaagagagacaggttcatcagtgacttgtttgtgtaaaagcttcctgctcattctccgctccgtcgtatgcaggcttttcgcccgcacagctgatctgcctgcaaggggtatttcggcccatacttgctgaacaagcatttgcatatcaaataggaatgccgaacccgatcgacctcttcatcacacgccactgagggctctgcttcgatctagcctcgactattctgttcctgaagaacaacgacaccttacgaggtgagagaaagggcgagcaggactgaccccaagatggtactggaagtcatcatgttcctcctcgagatggcgaacggagactggtcctgagcgtgtgtcgatccgcacatggttgtcgatcgtgacgagtccttccggttcaaggtgagcgcggatgtactcctcgaggtggctacgcctcggatgtgtcgtagcgagttggtcgtgtcggtggtcgctcttgctagactcttgatggacaagtgggaacgtgcggtcgaggatgtggtagagatgagccgtttggatagccagagggcggttgtcattctctgttcaccgcggtgctatcgacgacggatgaacaagggtttatggagtcgacgattgtcaattcggtttcgtggtacgggtcgtgttgcgtgttgtgtgttggaatgtttcctttgattttagatttcctttgttcgattgaatcgagacgcttcgctcgctcgtggtgatggtccatcagaggcgaaatgacgagtgcgagaggagagggtgaggggaagggaagggaagaacaaggggtttggcgcgtcgactaccagtcccagctctgataactacctgatcttgtcgtttcatatctcgttgatcatcatcatcatcgcatcaccttgcacctcgcaacgatcctcgatcctcgatcacagtcacgacaacctcgtacgtgtggattgtgtcaaccatcccgaaaatccatgcggattccccggtcgccgtcttcatgtcggcaagatagccagttttactaccaagccaaaatggttgggcaagggtaacggatcgtcttgaaccgcactgactgacacggacatgtagccgactttgtctgacgtttctgatgtccgcgcgtttattgccccgcgtgtattggtcttacgaatcacttaagcttgcttggatcccaagtgtccagcatcatcaaacagcgtagcagatgtatcgagcctgttcgtgatcgaccaacctctctgtagagcttcaaccttagataagcagttccagtgtgaccacgatggaagactcggtcaccctcacagaagccacaaccgatatccaacctatcgccaggtaagcatatgggaacccgcgcagacccgtcacgctttcaacctctaacctggattttcgtcttctcctgcctcgactccactgtctggatactcgcttcatccgaaacgtgggtgattgaatgaatatgctgcatgcaacctggctgtgggcgccgaattaccgtgtaaccggatgacagccataggccggatgccaagacaaggcggtacgaccgtcaactacggtaagcctcgaccttccgcactctgcctacctacgaaaacaagcattcgaggcaggtagcgtctagactatacagaggcctgatataaaccttgtcgttccgttattcgtgtagactttgggcgtcctctggacaaaagtcattggaggaagccaacgttctccttgtcggatgtgatgcggccggatgccaggctttaaagaacctggtacttcctggtcagtcccgaagatagcctcttattggtactgttagatcaactcgctcattctggttgcattcatgtcccgttctctctcgttggtcgcccattgccgtgaaacgcggacattcctcttctgttcggaacacgatcgcccgaacggacctttgaacgactcattccgccgtcatcgtcgtcgcatcgacaggaatcgcacaatttacgatccttaccggtgcaaaggtcgcaccaggagacatctcgaccaactttttccttctctccgaatcactcggacagagtctagcggccgaaagcgtcaggtcgggttctcgagggaaagcgttctgtgatcgctctcgcatccagactgatcacctctcatacgccatacagattgctaaaagagctcaaccccagcgttgaaggcaaggcggacaagaggtcggcgaaactggtcctcgcagatgatcccgagtggttcaggtcgttcagcctggtcatcgtctgcggttccggagacaacgaggatgtgggcgctcaggttgagcgagatctgagcacggtcctctgggagggtgagctgccgagtgctggtcagcctgatgggcggtgcagcgaacacgaggctgacgtaaaggcgctttgtgtcaccctaggcggacaggtggaaacaccgatgatctcgttgagaacgtctggattcgtagccaagatcaggactcagtttagggaacattgtggtgagtcatccatgttcgaatcgcgcgacagcttcgtgacgtactcaaagcgcaccatctggaccggacacagtaatcgacacccacccagaccattcgcacacgcttcggatcgacacgccttttaaagcgttggaagactacgcccttagtctggacctcgaatcgatggattcgatggagcactcgcatgtcccttatgtgttgttgctcattcgagcgttgagagcgttcgaggttggtcctggcagccgtgtagccgatccgtaaatagtgcttacgccttcctgtccctttagaaagagaatggaggccaaagaccgacatacgatacgacggacgctttcaaggatatattgacgagggaacgcaaggcgctggatgaggaaaactttgcagaagcggaagggcaggcattcgcggtaacgcaggtcagcgaagtgagtttcgtcgggccgagcggcattgctaagtactcctggttgatgaaggtgctcgttcaaggtaccggctgatatcaagaagctcatggaggatccagcatgcaccaatgtgtccagagaggtaagtacactggtggcatctttcgcaagcataaatctgatcgagtttgcactcctagtctaaggacttctggctgctggtcagagcgctcaaggcgttcgtcgctcacccggagaatacttccggtctgctgcccctctcggcatccttgcccgacatgcacacctcgacagactcttatatcaacctgcaaaacttgtacaagaagcaggccatggcggatgcgtctttattcaagagctgcctgaaagaggttttgagcacggccggtctggatgccgaagcaatttccgagacggatgcggacgcttttgtcaaacattgccataccctattatgcgagcgcggtagtcaggccaaaaagggcttggtagccgaggatgtggtggatgactttcgtgagttgggaaacctaaggacgcatcattgaaaaatctggacgctaagaagtcgccatctttcagtcatggaggcctttgaatccacgcacggagttgccctcaacatcgcctttcaccttgctgagaagcatcacatcaaaaaaggaacctggccaggcacggttgaagacgaataccacacggtcaaggctcagatgttcgatcaggccaagttgatcttgggcctgcccgatctcggatctaacgttgatagagatgacgatggcaagctcttcatccgaccggaactggacgaggacgacatggacgaagagacggagcaggatgccgagcgaagggacgaaacaagaaaggccaaaatcatgcaggatagcatcgacgaggtgttagttatgacagggccgaaaatggtatggctagtcgctgacaagcgatgttttcgtgcagatgccgcggcggaatggcagtcctgcctacgacagctgcccttgtcggtggtctggtcgctcaggaagcaatcaagcttatcaccaagcaatattcacccctcaacggtacatgcatcgtcgacctggtcaaaggcgggatgacaaggtactcggtctgattgacgaccgccttgaaacatataacgacctgtaatgaaaggcgagacgatcccagcgacgcggcttatcgcgcccgagaccatttcgtggtctatcaaatgtacaaagttagagccggcaggagtatgacatgctccatcaaagcacgtgtaattatctgctgtgtcgatgtggagaagctggaggactgcatcgtaacgactgtatgtagaggaatggatactgcctccactgaaaagaattcttgcatagccataggaagcccgcgagaatgccgcgttcggttcgttgcctgctcgagctaacgcgatggctgaatgtacccgatactggaagcttggcttgaaggaacgattgactttttcacttccacttggaaagagtcatcttgcgtttgatcgttcaacggcgggtgaacagggtcatgaagcttgtgggatgggcgcggcgatgtcaatttgttgcctggcttgcctggccagatccaatacgataccagcctcgggggaaggcttcgtcaaacatttcttgacactggattcggtaccgctcggtaataaccatagggttcttggctcgaaaatgcacccagcagcccgttgggaggactctcttctctgaagccattcgaggagcaggctcgggtcatacggcttcttgggcattttccaacgatgatagttgacattgtcaaggtaaaggtaaagactcttgaggatgccggaaccatctggccccgtatcgtctcgatagacttcggacttccaccacttggcggcttgttccaaatgctcgaaattgacggagatgtcgagggcatccagggtctcgcgtaacaatggcggatgatccttatccatactccatgtcaacatcggccaccagaaagggtgttcccagtcatgtatatccagttcttcaagtatggggaagttgaccagggcggtttgtagattgatcgtcctgaagcggtccgagctttccagaattcgatgacgcgaagccaatgacagcccccataatttagggttcgccggacgattgcttgtcgtttcatgctccgataagcgaagctatttgcaccaaatatctgtgggtaatatttggtcgacctcggataatgagagcgtaaggctttccagcggtaccttgagcgcatctgcttctcggtaaagattgctcatgagcacgagctcaacgggggaccccaagtccagaatgtagttttctcttatttccagttgtctccataccagtcgatccatgatgtggcagtaaaccgtctcaaccatatccacgagtttcgagaacaaaatcttgctggtcagatacactaagcgaagcgtgctgtcaggaggtttctgtacctccaagcacttatgtaggtcaggatgatcggcttcgtagatgacgaatttccggacatagttttacgcctcggcttcttcttctcattcgagcaagcacatttcctctcgatgtaaccggcagcgaaatgcacggacgtatcgaaaaatgtgacgaggaatggactgaggcatgattcaccatattgtctccgttagatccggctcgcctgactttctcgaaaagcaaatcgccttaggtgcttaccggtctcaaatgggtgccacccacgccacagcatggcacaatcctgaacagatgacgggccgcaacatccgataggttactgcaaagctgtcgacagttccccagtgtctcttggtcgcactgcgcaaatagtgcatcgaacaggtcgttggggaaattcttccagatcgcttttctttgacatatctattgattagatgatgctcatgtttgcaaaaatggtatcctgcttacggctgagagtgtgccagaaaaccttcagctgcttctcattcagtccgttcgttgcgagcctagcagccgtcgtcatcgtgatcgagattgagggttcagaaacgccaatcgcagtccaagcacgcttggtcgccccgagcccggtagtatctcgccaggtagaatgcagcaaattcgacgattaatgcagataggtaaagtaaataatgacgaccttgtggattattctatttctggatgtcagggatgttatcaatccgccaccatgagccgtgagattcgagcctgtgatgatgagaaaacagattgattcttacgaatggattgagaaattgatgggatcacttcatcatggcgttccgctactcaaccggaatcaaaacttggctatgccgcgatcatcgtccgattcttgtagattaccttggctttggtcagggattgctcattcatccagcaaaatgcagactggatatcacatcgcctgttgttcgtccaggccgaacggcagggaggggagatgtgcggcgttctcaaataccacattgagaggccacataaatcgcttcgctcgaatcgctcgcatggcttgtccgccttttcgttgcgctatagttacgtgtcacatcgcactcgatgattcacatcgacgcgaatgaaacgcgcgacctggacatgcattccgtatgcatccttgttcttgcaatacaactgtaggtctaattgttgaaatgacccacgcctcacttggtgagctgggtgcacgggaatatggttcttgcagaggtataatcatctggaggaatgttcagtctagagtcatacaaaagagaaacaacagcagacgagaagccttctaggagggtgtagaccaggcttgagacataaggcgctgaacctattgtgacaatagagtattgcgagacgttttagccggattcgtattggcaaagtgctgatcacttacagtaatcaaggcttggtatttaacgtcagggctatcgtgagccatcagttccatggctttgactttaccgccattgtccgtgacgagcctaaagatccaaatgacaatcagttccaatgctacagcagcaaaggacctttcgatggtactgacttgcgcgcccggtctccaccatattgcaggaatttgccgacatcgtgaactccgacgctcaacaccaacggttcccgcgttccactcagcagagatatgagttgcctaatcagagtggcatggacggtattgtcagaacgatgatcacttgcgcttgcggcgagagccacctacttgatggtttttccgccaccctccgatccgagacgctcggcattctccttccagaaatcttccgattcatgcactgctgaccaagtaaggtgaccgctcgagacctccgaaacgtactcgtcgtacgtactgagaacgtacgtcgggtaagtcgctgctcagtcgactcgcacgtggcgagaacaaacttacgtcaatccctctaatcgttctttgagctccgacttgagaactccgatatcctcgatcacatcatcgtccgaccacttcctcgtcgagagcgacgtcaccaacgtcaggagcttggcagcgatcattgacggtacgttcacgtcgggagcgatcaagagcaggttctgatttttgtaaggtaatgattgtgagctggcgaccggtcacatctgtcttgaatttagctcaccttcaaagtcgccatgatgacacgagtgaccttctccttagcagcatgtttcgcttgctcagtcaacagcggaatcaagttgaaccgcctgatcatgaaggtgaaaaaatgaaattctgtcagcaccgaactgcccgacccctctgcgcattcgcttgcgaaagttcacttgtcggcaccctgcgcaacctcctcctcgtaactgagctcccagaaacagacaatgatccagtattgcagctggggagtcgggtttgactttaaagccttgaccaaactaattcaagttgtcgaggtttggtgagtttatgaccgctctgagacctctgtggctgattctcaccctgaaagaagcgaatcgtgttcccagaccgcatgtcggatcttccttgtgctcaggatagctcctaggcattggattgcgagatctcgagcaggagacgggttggctgtaggtcacagaaaatagcatcagtacacctcattcgacattcgacatcgaatcgacgcacagttggtcagcttggcaagcgaattgagaagcggggttgtagattcggtggataaaggttgagggtcggtgctagaaccggtaccaaacgtaagctgcacattctggtccgagaatcggatcgattcggtacccacgagatcaagagagccatgatcctcaagctctcgagcaggacaaattcatcctgcatcgagaggcacttgatcaagggtccgtaagggtcatcagacttgccgtcagtcgatgacctcaagttgtgaaacaacggcaaggtgtcaggctctgcgacagcggcgttggatgaatgaggacactcggttaagctcatgcagtacgctacagaacgtggttgattcgctcacctccaagcatgttggaaatgccaacaagtacggcttgaacggtatcgaccttctgcagcttccgcaggagttcaatgtacagctttgcgtatgtcgagccttgttgagcgaagagagcagatttctgcgatcggggctgaacgagagtttggccgggttagtaaaagtttgcctatcaagacgagctatgtgtgtgtgctaacctgacgctccaatcctttcagaagggtcacttcttcagctgaaacgagcttggccctttgatatccctatcaattggaccatacgaagtttttgagcatgcagtagtgagaccggaatgaagaacaatagtcacctcccatgatacacccttggcgttgatctttccgcattgatcgtcgagaaagggagagaagatgggtggggggattgccagtgttgcggtggccatcttgatcttgcaagtcgatgtcgccggcttagctacgattacgtatctctagcttgtactgtcgattacccttatcttcgggtcttcgatgtgagtgattcagtcaagatggtagcactcttggatcttgcacttcacatcggtcaactctatcataaccatcgcgatcatcatcatcacccatgcaccgtgcaccatgatgatctacctagcagctagctgccagatgacgcgggacccagttctgtgttcaattgtcagtgagcctggcatataaagtcgataacggtcaggtttggacagcttcaatcctcgccgtttgccatgacgtttaagacgtcaggatgcataatcctgaatcacaaatcgtattgtcaatgggtctggatatgttgccactatgttacgatgccaatgtgatgcgcgcgaatgtcgatatccagtcttccggtcgtaatatgaggctggtcgttcagttccacttcagtgctttcagccaggcgttacgttcgttcaggttcgttgtccggtatacggtcgtgttggtcgttgctgctatcgagaatacgttcgtggtctggggtcatcggttttggttagctgtcgagcttttcgaggtcgaaaagcagactgaaatcaaagtacctctaaagcgatttctaagtcatccgcctcgtcatagttagcgttctccaggaatatcacgctatcttcttgccgcaagtcgttcgactcaaacagacggagatagggcctgttgagatagaaataagcgaggaaccacactctgcacgtgtggaaggattgcgtgactcaccttgtcaatctcgcataccgacgagtccattcgccttctgcaggagaggttaatacctctatccatccctccttgtcgacacgtgttctgattgaggtatacgctatcagttgcagcgcgtagaaattccgccttggttgactttcactcacgagatgaagacctcgttcaagcgcatgtggccatcttgagccaaccggaaggtcacggagtcagatagattccgggggaagcgctttcagaaagatgaagaaacgttaataccgtggcacgcattgagcgatccttccccttactctctggctgacggtttcggtccatgcttgtacagcttgacgcagcaatacttcagatgacttttccgagcgcggttccaagttcgacccttcgattcgcgccgcggcggcctgaacgtcggcgatcaagtattggcgcttcctttggtccaaatacgctgtcaatagcgccatttggctggtcgtcatcgctgccatattctccgaaggtatttgtagttcgaacgtcctgctggagtgcgctgcaagaagaggtgggcgtagatagtccataatagcgcttcgtcgtctcgtttgacttccggtgatccggaaacgcagattttgcacgaccaaagctgggacacggtggtcggtgaagctgacctggaatgacaattggcaagagatatgttgtccattcggtgtcttcttttccatcccgggcagatcttcgaatttgcatgtgagtccgagcagaccggttccatcaccgcggtaggttggctgctgcgtcaacaagccggaattgtccggattgccgaccccgtgatgggttggtgacagattcactacgtctcgttcatcgccattttgtgaacgaagcgtaacaaaattgattcccttccaatccaaagatcgagccgaattgtgtatcaactcaatccgtatatgtcgctgtcgaccttgccgaagggtgaagacggcgtctttcacatcgtagtcggcggggacgaatatcccctggctatcaggctccagaaccgttatgtgcacagtcatagtatgttcgacagttccggaaggcttttgtttggctatggagcttccggatttcggctcagccggatcgatgggtatccgatcttcgaggtttttcaagtatgagcccgtgactttgccaaagaagtcgacctggatgtagagaggctgatcgtctggcgatatgtctagaccgaaagtctcctttagcttcatgtgagccgcagacgtttcggtcagatcagtaatgtcactagaccgcagattctcccgcttccctttcattccaaaggtcggtagacggagctgcatgtgagccgaagtgcttccttcggcgaaggccctcacattactgaggctgatagtggccacctttgaccgttcagtgagcccctctaggacaatgagctcatcccaagcaacgcgaacagtcatattgcccactgcctctgccgtctcgatgcattgaatcggtaactgcattggaccagcgatacgaggatgaagtgcaaacatcgtcgtccccagatgggtccaggagggacaagggaccgtcctgaaagccgtttctggcgcgggccgatgggctgcatctgacttgctgccgagcttccgcatgaagggcagttgcctttgcagcttttctgtcgaccatacgtaggccaccatccgtgctttatcaatcacaaggatgacgatatcgccattggcacgggtgaccgaatgtgtagcttcggcatcgaataatatcgattccacatgcgtttccatggaggacgcaggggctccacgagatgcaaccaggcggtaggtgattcctgttgcgtgcttgtcggccagacggtttgcttcttcaacgctagcagattgttggcgcatcgccttcgccatagcgatgagtctgacactacgccattgtcggacggcctgtcgcgccgcgtccttctcacggtccagtagtacaccgcttaatcgggtacttagcgattcgaaacggttctgcaatgcaagttgtcgaagcagcctgatttcttcggccatccggtccatttgtaaattgcttcctgccctactaggttggcgtcgttgggaagactcctcgatggtctcggtcgatacgtctgtatccactttcgaagcgacgtcgaccttgtcgctggcgggctgtaccgtcgtcggaaccgtcagcatgtcgcgatcagatagatcatcgttccatggattatcgaccatgctagcaggcgtcgatgtatcgggcgagcgtgcgcgatccataacttgaacagcacgcagcctctttggagttcctacttgagactctggacgccgccgtgatgtgcgcgccctcgtgatatcctgaaatagtccatcaagttcctcgtcgcccaacatatccagatcgtcgcccgtcagagtaagtcgtgacagggcctcttttcgagcaaacgtccagtcgacaacgtgtccgatccctgtgtcctttccgtaatcgctcacttgggtctcttccgcatgcatgtccgccaaagcgccagagaagcttgtcgactctcgcatgcgttgcgcacgcactgactgaggcgagctaaagcggaacacatgccagtcgatgataatacggaagccagattcgagcggcgtcgcactgccgggaggtatgagtttcccattgaccaatactgtagcttgctcaaacggctcgatggaaactttgcccttgtcattaacgaaagcgcagtgttcctctaggatcctgggactagacaacttgatggctgctgtagtcgaatcgatgttacccaccagtatcctgccttcggggattgagtaaagcaagcactcgttttgcaggggatcctggaatcaagaaccttgatgagctaccggctggttttagataaggcctctctcttacctcgttcaaattgaccagatgcggccacttcttgggagcatgtacacccaccaatgtacgatccttatcgagactgattccgagctcctccaaagcctgttcccgtgcaacgtgtatctctcgagtcttggctaacttgtcttcccagctttcatttagtgatgccatgagcttttctgacgcctccaagttctcttgaagttctagctctatacaacgagggtgctgtagcgggctggaatcgtggcggcagtgttcagacttactggttaccgtcctgatctcccctgtcttcgtcttgtagctcacaatctgcttctccggaggagtgctctcgtcaaacacagcctcggaacttccacccgccgccctttgtcggaggactgctagctcttccttgagctcgcgaatcatctttgcgtttgggtcctcgttgacaacggcgttagtcttgatacgcttggcctggtctgcataccggagcgtcgaaagggtttcttcgtaatctgcgggactgattgcagcaatcatgcatgttcgcgaattccctccaagagattctttgagcagccatgtcaagacctaaatttatgttcagtactggtacaggaatcgatgtctgctggcaggaacccactgagtctcgataaggcacgaattcgtcctttttctttttctgccgtgtatgcgaagtggtgctcgtgctaagcgcctgaatcactttcccgagtgtcgtcaaagaccgattgatatttgcgccttctttcaacctcgcaccctgtagtgccgctcgtcagtgctcatgcgtgagacttcggccgtctcacacgctcaccgttgcacccgtactgttcgccctttcggatccagctaaatccactagcgaaatcttggagactttttcaccagccatcttggtagcctcatcgtgccgtttttgagtcaggatgacggtgaagacggcatgacttctcgaactcgtctcattcatggctgtcgaggcgacggtcctagctttgttcccctcgtccatcacggtcatcatctggctataagattcgacgactagccgtgataggtcctccacatagggaccgagcgatggatgttcccggactttcaaggcgcctttgtttttgggattcagtagatctcgcactacattgacaacgaccgattagtcacatacagttacataggcgctgcggttcaggagctcacctttctcgttgtagatttccatatatgatacctcaaccctaaactctagcttcgggtcggctgcggtcttgctatctattcgcgcgaacaattcctctgttacgagcgggatgacacccttgtccgagccgtctagtgaacgatttctcaattagaaagctaatgagtggatccagctaagcggggcagggaacttacatcctaccatactgtatgtcttgccgctcgacgtttgtccataagcaaacgtgcagacattgtatccggcaaaactgtggtccaatagctcgatgcctacgtcctgatataaagtctgctgtgaggcgtaattcggctcatttgggtcacccgccgaccagtacgatttgtctgatgatatgtcaggctatcgtctcagatactatcaaggtacagaatacctcgacactcaccgaagctgaaagtgtgttccctcctttcccgctctcgatcctttgcagctgcatcgtcattgcccggtggaacgatagtcgtttggctgccatccatccggacaaggcactgggcgcctcttgccttctctatatcacgttgtgatacaggtccaatcagaatctagcgctcgcctcgcctgcatagaacgcttcgcgcagactcacctcgagcattcagaggacggcatctgcgatcacgcattcgtcgtaatgagctatgaaaggcggacctgatattctatctcccttcagcctagctcaccttactaccaccttgatgttccctgctccagcagaatccaccgtctcgatgttcccaggcatgccgttcgacatgtctcgatattgtagatcgatcaatagccgatcgtcaattcccgttgatagttccggtgatgcaggtgatcccggtttgacatcgatgcttcaggtggccgtttatgcggcgatcgataatgtttcagtctcttcgtacgagcgcagatttgtacgagatgctagattgaggacggtatgtcgatgctgtatcgaccactcatcgtcattcctttctgatcatcattttactttgtgaagtacgcttccctcaactctggatatgctctagcgaagcggcttgtttactttgtcaagcggccaaccggtcctttgttcgtcatcgccagaggcggatcgcagttaccaagaaactcgagccaggtaatgaatatcatcaataatacagcagataaaagtggaaagataaaggcggtagatgatatataaaaagacaataacgggttcaaagcgttgacaggcccgttatgtgacgtgaggaaatggcataagagagggcccggtccaatatggggcgagttgagggttgatcgagcgccgggatgtataagcgcccctgaatgcctttcgagaaaggctggatatgcctgaagaagagattgtctatgttgttgatgtcgtgtaacgctgcttcacggctggcccggcgaagattgaaacgtgggagaggccaggaattacggccgatgtgattgtgcccacgtcaagtccagccgtccgcagtcgctgccatcgtcgtgagaaggggtatcctatcgtccgtccatacgactcgatcgaatccttgtaccctcgtcctcccatgttcgccttccgtcttgctctcgcccgctctttccggccgtcctccctgcttaaagccccatcataccggaaatgaccaggaccccggcaccgaccaagccggcaacggcctgcacgccgctgacgccccgttccgagatcgcacccgaacgtttctgaagcttctccgaatcctcgtccaacgatcgcttcgacgcttgacccgtggcctgcataacgacaactcggtcagcgatcctgtatcacggttacgtactcaacattctcgcactcacgttgactccggtaaggatgacagtaggcaacatgttgggcgggttggcggtcaagtacaagggcgcgagaggcttgccatcgaacgcgttcagctggagcgcgtacgattgcttgatcgagtcgacctggataccccaatcctggaacatgaccatttgatcgtagtacgttatcaggttggtaacagcggcacaagggtcctggacctgaatcctcccgtcggcggagaaggggaacaagctcaatgatccgttgttgttcaattggtatcgcccgtgctgccacaggatgaatgcggtgatgcatcgagggtcggcagggttagggttgtaccggtattgagcctcttcgaagtgaccatcgtcggtactgcgaggcgagcgcgtataggtgtggtagaatcattggtcagtaagcgtcaaccagaacgaagacctataggagggaaactgacaatgagtaactgatgccagtggtggtcgggtaggtgaacgaaaagttctgggggttgcagaaactctatgcacgggaaagtcaggcatgttagcgttcgatttctctcttatatcgtttggtttggtcaatgtggaaagtgcggtagtcgatcggccagggtcagacaaggagtattcgggatagggcagggaggtggcatacgtggccggataagatacggcgacccggtctgatcagaacgagagcgagagggatgaaacgtgatcaacccgcatcttcgtgctcgctcagctgatggggtgatcgagatggcgaccatgaaggtcgcgatcgagcaggccattcctcagctgtgctctgggtagcctatcgattgaccagtcatcggcaaggcggcctggggacagaacgtctcgttcgcggcaagtctgcctctgtatgattgttttgatccggtctgtgcgaatcgcccagcctgcccaaaagtctccagtaccgaccgatctctaacgagtaccacaactcgcagaccgaagaacgtgctcgacactcactcctccagtctggacaccaccactcccgctactccacgtccccgtcaacgaggtgatgttgttcaactgcgaaaggtctccctgagctcggacggccgagagtccggtagagagcgccaagagcgatgcggtgaggatcgaggtgaacatcctagtcctacttctttgtccctgtatcgtcgtcctggtgctgagagttcggaacgggtagctagtcgtgcgtgtgtggttcttggaggatcgagaggcgggtcgtttgtgcacggggataggtatcaaagggggggggaaggaattccgcgcaaaggcgatttgatacgagttgagattaaggcgaggaggttttgaaaggagcgacgatggaaggttggaaagactagtgctagatgaagaaagtgtgtggtacaggagatgatcaaggactaatggtagtggataccgagatgcaagaaagacgatgagattgttaggtttgacgagatatggcctgtctcttatacgcatctgacgctgccgacgacttaataggtgtagatctcggtggtcgccgtatcattaaaaaaaaaaaaaaaaaaaaaccccccttccaggacatccaatcgaggtctgtacaacgtcctcctcctcgtcgcagctgggatctgtttcggatccgtatccacattctccatgcactttatcggcaacaactcgctcgtcctccatcacccgctcgaacaagaaaagggttacccctcactcaccctcgcttatgcaccgggatggaccgtactcagcctcgtcgtcagttgtacgtgcatgataggcgcctttttcgtcatgggcctcgaagttggttgggatcggtggcatggcaaggtctccagggtcgggaacatctttgggagagggacagcgacgggtgggattagggtcaacggtggggaagacgctcaacatccccctcatcatcatcgtcatcggaacgaccacggggacgtcgtgtacgaggacgaaccggtcgagatcaccgacctgagcgatcacgcgctcaaagatcgaccgggggacgtcttggcactcgacaaggacgccgtcgtcaagaagaaaaagaacctatcgaccgatctcaggaaacacgagatcaagctcaagttggacgccgtgatcgacaaactcgagtgggcgttggggtggagcatgatcgatctgggtaacaggccaggtgggagagccgagaggaggaagaagcagtgggaggagaccagggcggaggataagaatgacaggttggattccgagggtcgggcgcaagaggacgaggatggttgggatggcaaggtctcgcaaaaggaagagccggctccggtccatattcgacctccgccttcggatcccgtggcttcggggtacgacaatgaagtgctcgagaacgatatcgtgcccgccaatcggtacgatcgatcgccctttgacacggggaggtcgtcgagagaacctcctagaaagttatcgggaagggaagcagaggaagggatcgttcccgttcccgccccgactaccggccgctacgccagacgaggatcagtgccaaacatcaaattacgagatctagctccgttcgctccgcccctctcggccgattcggctcaacccctcttttcgcccacgttcagtttcccaggaccagggtcgacgttgcattccgacaggacgacgccgttgtcaggcacgacgtcggctggcagtctctaccctccgccatctatcttgcagggtcgaagagcgtccgtcccggtaaatgccttgttccctcgagaattacccagctcgacgttcaccttggctaggatccagtctcgtcccgagatagacggtgaagaccctcttgctggctcgctccacgacgagtcggcaggtgaaaatcagccgatcgagatgagcgcgagaagggaccctccggggcaagcgagcttgatcctcgagaagcgccgggaaagtacggcgagcgtgacgttcaggatggacgcgctcggtgatacgtcgacgacaaacctctaccggccgaacccggtcgaaaggcaagatacggctcgcagcctgaccttgtcaaacggggatggcgaatccagacgcggtcgttccaggcgatcgtccaagacccgcagcgaatcagataaaggctggctcgcaaaggccaaaaatctcctcggttacgacgtcgtgaccaagcaagaggtccgcaagatcctgatcgccgggacgatttgcggatggggaatcgctgggatgcgtaggtcgtgcacgactcgttttgcacgcgcaccgggccaagtcgcttaccctcctctctcatttggacagattacctgggtcagaaatccattgtctcgataccttacatcagctactcggtcgccaacgtcgtcggcagcgtggtcatcgcatgcgtcgccgtcatcgtcgccctctacatcatgtttatcgtattacggcccaggctcaagcacggatggttgatcaaggtagccatcgcatgcatcctcggtgcagcggtctgcttcatgcattacactgcgatgggaggtgagtcagagaatggaggcggacgtggtcgacctgagtctgactcgtcaacctaccctaggcacgacctatgcacttatcgccggggtcgtcccccccaagagcgcgttcggttcaaccaagaagatgatcaccgggatcgtcgcatcgctggccatcatcgcgtgcctcggcatttttacctttagcattgtcgcgcacctgcgcaatctggcccaccgaaagggaaggcgcagagtcgtcattgctgccatgatctacgacgaagaggatcggttgctggtgtccccggacggcatgctgcccatgtgcgacattgcatccatcgacgtcgacaacaagaagcgcaacgcaaatcgtaccaagggctgggacgccgagtccacttcatcgagcgtgctagatatcgacttgaccagctcacatcctgcttttatcgctgcgctaagaagtacgtgggcctggcgacaacccggagtcctgcccgcacgtcgcccaagcaccagtctacccaacgacagctcgaacggctcgagtttgcaccgcgattccgtgacacaagcggatcgtacgacacccgacatctcgaggaacgccaggaggatatccaccttgtcgttggccgactcggcagtctacccgggcaccctcgacggccgagctccgatgacgctgaatgtcggcaaattcatggagagattttcggtagcggtgggtttcttggccggcgtcgtgaccgggagcgagcaaggggtccgaagactcggcgtgttgtacgatcggatcttgacgacgtgagtatcacgaggtcgaggatcactcgtgctctttcctgatcggtatttcctatgtagtggtcacgtttcagtcggcggcgatcgcgaacatggcggcaccgtgtccaagggacagctcatctttctggttcgccgtgtgacgacggttcacgaaaaaagccaactcttggcgagaaactttctctttgcggaaccctacgccgtcgcatcgatcatgtcgcggacgttggcggtaccggtggacaactttctggatatcattgacgaccagcgtgacttttgcgacaagggtatggctcaggatattcggcccggtcggctctacgcaacggcctgcattatccagcccaccacctttgagggtatccgtgtctgtgttgatccccaacagcggcacgaattgccgcacgaagaactttgcttgctctcgtcggtaccatcggccgtccggacgcaagataccagccagagtgacgcgatctactctggtacgatcgaggagattggagacgctctcatctgcctcgaaggacagacgctgttcgagatgctagccccacgcaacgagttgctatccgcctccgactcgctaccagaagacccggccgtctcaagactccgaaagattctggtggagacggtgattcccatgttggacggaatgctttcggcaaaagcgatgacgcagatcttgcctcgactgaaattggtgcctaccgtcatacccctgacggctcctttgatctccccgatcttcaaagctcacggtctgtctcgggttcccgaagtgaccatggcgacgtcgatggcttggactatcatgttcaaggctgtacttcccgtcgacgcggataacagcggtgtgcagtgggagtcgtggacactgttccgagcacagcaagaatgcatccttcgagacgggcggcaaggccaagcggcggctcgaaacgcgctcgcgcacgccgcactgggagcttccattcacaatccggcgcgtcgaccttcgaaaattcaatggcagacttctttcccgagcgaggacacattcggaggtgcgaccacgaggcgaccttctgccgatcctgaaactagtctcggtctcgaagatcgtccgcctatctatgacagctcggctcaaggcaggatgaatccgaacctatccatcacggttcatcgtcggagttcgatcgcgccatcgagcatggacggaccgttgacgtttgacgagagcgatcagtcacaggaggcggctccgggagtcagcacgtggcattcggactggttgaccagaattctcaggcaggatttgcatcagcggccgtcagaatatgatttagagcagtattagtttataggcggaatttcatcttgtaagggctataatgacgattgacattttgtatcacatcgagcctcctgttttgggtcgtacaaatctatcattcctgtctaggcatcgctatgcaaacgtgagaccggttaagcttcggccatcttggacttgagcttggcctatcgacggcagcatatcgcattagcaaagcagcacatggattttgtgcgctcgaccaccttgacgactcacctcgacggccttcatgtaaacgtcggtggtgacccagtgttcacgggtcatcttggacccgtacatggccagggcgagatctttggtcatgataccgtccacatcgatggtctcggtacagctctcctcgagcttggtggcaaacttggccagttcaggggtgtcatcaagcttggctcggaaggcgagacctcgagtccatgcaaagatcgaggctacggggttggtggaagtctcgttgcccttttggaactctcggtagtgtcgggtgacggtacctgggagtatcaggtcagccaagtcgccattgagtgattggcgagccagtccagaactcaccgtgagcggcttccgactccatagtggagccatcgggagtgatcaactcggaagtcatcataccgagactaccgaatccttgggcgagaatgtcactctgctcgacaagaccgagatccgaatcagctttggctacacgtgttcgaacagacgcgatcgagcgagtacgaacctgaacatcaccgtcgtaattcttgcaagcccaaacgaatccacccgaagatttgatggcctgagcgaccatgtcatctacacaaggcgaggggagagtcgtcagcacccagggctgtcgagctcagtgcgatgaagtgtatgagcaggacttgccgatcagtcggtgctcgtaccacaatccgtgcttcttgaactcggcagcgtagtcactggatcgttgcaaagtctagcgagatcagcctctgcatcactgcgagcgccagagcggagctcgtcactcacgcttggtaaatctcctcgaaaatgtccttgaatcgaccatcgtatttcttcaggatggtgctggatttcgatacagccacgatcagcgatgattcgtcagaattcttcccagtctttctccactcactttttagtagacatgtactatagtcccgggaaggggacagcggcgcgggcgagcgatgagactaggtattccttgatcaatggcacaccgaccaaggactcacgaggggcatcttcttggagatggccatcttgaaggacgagtgtgcgaaccccttgatcgactatgacgtacacgacccccaacccgcacgatcagtctcacggtcatcctcgacgagcacgtgtgcgatgactcgcctcgtcagtgttgtacatggacaaggcgactccgggtcccttgaagtcgtacacgttcatgaccaccttgtcaccgccgtccgcgggggtgtaggtgagctcgagtttcccaggtccgggagcgataaagtcggtggatttgtactgtacaagggtcggttgatccgtaagttgtggtcccgcaagacacgagccgaaaagggtcgacatggagggcgggggagtaagagtgggtcgttcgacgtacctggtcaccaaacgcgtgacggccgatgacgatgggcttgatccaaccggggatgggtttaggtatccgctcaatgatgatgggttcacggaagacggttccgttgaggatgtttcggatctgttgcccggggatgcagaacatggtggacgacggtacatcggatcagctcgagaccgtagcgcggtatcgcaagaccggcggaaagagtttgggagaaagagtgtcgaacgtacggtaccgttgggactcctccacatctgtttcaacttgaactcttccacccgggcctcgtcaggggtgatggtggcacacttgacaccgacattgtatttcttgatggcctcggccgagtctacggtgacctggtcgtcggtctgtagacacagagcaacgagatgatggtgcgtgtttgcatgtcagtcgggttcagactggtgttttcgggaggacaggatgacgcagaggggtactcacggcatcacggttctccatacccaagtcgtagtacttgagatcgatctccaagttgggcaagatgagctaatccccgcaattaccagcgacggacaagacgagattagcgatcatcttcccttgcatcgctccggaaaccctttccaggacgccaaagaacgccccccaacggaaaaaaaagcggcgagggcaagattgaacggtcggacgtacctcttccctgatctttttccagatgatcctcgtcatctcgtccccgtccaactcgacgacggggttcttgaccttgatcttggtcgctacggcttgctgggcatagcctgttgaagacgagttatcatccgtgcgtcaacaggtcgagcagagccaacgagggggatggacacaggcgcgttaggagcagagggaaagcacggagcgggatggtcgtcagcccaacgtctcgctaacccaacgcgacacgaatagcggtggatgcggagctcacctcgatgggagtggatcccgcctagaatggtagattcggacatcctgctcgattgacgggcggcgttgaagagcagacctcgggtggaagacaactgtagggtggtcgagtcacggcgtagcacggcacgagggggacgtttatcaatggtacgatagtgacaagcaagatgatcagtagcgagtcctagtaacaacccaaatgtaaagcaaggtggttgatggtgcagcttaccatattatggaccaaagttgcaagctggttgctattcgacttcgggtcgatacggggggttcggcgttgtgggtcagcaaaaagccgacggaaggaaagcgatgacagtgcacgaacgaggctttaggtacttgaatgaagctagtacagggggatgtaatctgatcctgcgtgggtatgaatgttataggaatagtttcggaataaagccgaacgaggagagttagagaggtagagacggggggtgagatagagagagacacctgggtggtggcctggcctggtggagatttcgggtcgattggttcgttcggttcacgcgactcagctcaggcgggaagatgaaccgaccggacgaaagcggttcaaacgggtacaacgagtcaacatccatcttcaacatgcactccgtggatctcggaccaccaagacgttcatctcggcggttagtatcaggtgccaagtagatggctttcagtcgatgtgatcgaatcaagcaggaaccgcgacgcaacgagacaggagggacacgagaaagcagacaacaatcaagaggagaatgacaaacatggcataattcatcataacgactcggtttgattacaatcggatttgccctgttcttaatggaccgtcgtagaccactccacccccggccgaaagccgagggtcattagagtctcgcggtgagtagacaggcgaggattcctctggacaaggacctcggggttgtttcttggtggttctagaaatagctcgtcgacgtgggatgaagtaccgttctcccgaaggagatggttgcgtcgctcgcagagtgtcaagcaccgggttgtattttgggggggagagaggggagcaaggaaatcgaaagaagatagtatacgggaatagaagtccggttccgaagaggtactggtcgaggtgttgctcctagcgtccggcgtccgtcgtccatcgagagaagagactgaacatcgcacaccggcctcgagtctagtcggtatgcaaccccgtcattcgcaaaagaaagacccagccaaagatgttatccggcgagagccatttactcgaattcgcgtcgacgtcgtagcgcttcgtagagcagccgggggtgtgtttggtctgtcgtccgctctcgatgtccgtcgggtcgtaacgagagatcgcccgtacctcctcttcaccagctgcgggaatccggcttgccgaatgcagagaaaaagaacgtgagacaaagacataccggggaagctgagaagcaacggcgccaatgataggccgaatgtccatcgcctgtgaagcacgaaccccgttaccccgcgcatctctgaaacctttcctcgtccgcctctcaccgtgaagcgagcgacaagacgaggaagagcgacaaggccgcgggtgtagatcttgcagggtcgtagcaaatgaacgatgacacctcgactccgagtgaccagtgaagagggtttgaatggttctgtccccttccgtattggatgacccgcgcgcttcacgactccgaggatcgagcgatggagaccagtggaaggcgattcccagaggaactgctggtcctcatgcctgatcctggataccgcgcggggaaggggatgatgatcggggtcgtggataggcggaagggaagaaaggtgacatggtcaggacgaaggtgagggaaggggatcggcgaggcatagatctcgatcttgtcatgaggttcatctcgtttagaatacaaacctgcgaatgtgatccgtgtcttcatgtcagcaagccgagttagacagttcagatttatgagcgagcgagacttacagcaactccaatgctggacggaatgaaaagagctacgactagcggtctgccgaatgtcgaacgagcacgagggccaatcagtctcacgaaactctctcttgaacgatcgagtgaacgtagaggccaaaaattgtacgtacaaaactcgtgagtgtcgtcacctttcttgacgacttgctgttaagagggttcaggggcagggtgtcagggtataagtactctgccaggacgcgaccgagcgggaaaggaagggagaggaggcagaagggaaaagtttcgttgcgcttgtcgaatggcgaatgacgcgagacgcgttttgcgcttcctctttgccaaaacacggctggcaaccaagagggactggtaggggatgacgaatcgatgaaacggttcaatgagctcaccttccaagcctcgtcaaagtctccaggcaggatcacgtaacggttcttcctcacagctgtaaaggcaagccaggtgcactggttaggaaagtcaggtcgacagtcgcgacgtgccgaggtctcaccttgcagaccagcggcttgacagatcgaagcgatctctgccgaactcaacctatcgggcctcgagacgtctgtccaagccatcaagatggtcgtcagcacagactgtaaccaccagagtgtatcgtaaacatgggagtgacgtcgacgacgtacagtcttcgagatcaacgtcgggtcccaagttcatcttgcccgtgacggtctggaagatcaacctcctctcccgcctcgagggccaggggaactcgatcttcctgtccaatcgaccgggacgcagaagcgcggggtccaacgtgtcttgtcggttagtcgccatgatgacctgcgatgcgtagcccccgaacgtgtagtgtattagcggccccgtcctgaccttgtgacacggttcgattgatgactcgagcgcaccttgacgttgcttccctgatcgaacccgtccatctggttcagcagttccaacaagatcctctgtacctccctatcggcaccggtctgcgcgtcgaatcgtttcgtggcgatcgcatcgacctcgtcgataaagatgatagagggtgcattctcacgagccatacggaagacgtctcggaccattcgggggccctgtcagtcgggtcgagcacgtcggtaagctataccgcggacagacgtgcataaggattttgcaacgccgacacgccgagactcacctctcccaagtatttctgaacaaactctgaaccgacgactcgaataaagctcgccgtcgtcgagtttgccactgccttgaccaacatggtctttcccgtacctgcaaagcccacccacttgtcagcctcgcagatgatgtcaggaatgactcgacaagcgactcaccgggaggaccgtacaacaagactcctcgaggagggtcgataccgatctttcgatacaggtcgaactgcaggaagaaacgacgaagcccgatcaatctcgaggagctcggcatctcaccgagagacccaaactgacctgggtcaagggcaattcgacggcttccctgatttcctgcttctgactgtccaacccaccgacatcctcgtacctaacatccggcttttcctcggctcccaacatcgagatgctcgaatccgcctcgggaggcaagatgtcgacgagcgcgttggaatgacggtgcaaggcgacggatgaggaaggtttgaggagttctcgatcgagggtggagaggattcggacgacatagttgctaccggtcgtactacccacgataccacggactccatcgatcgcttcgaggaattgaccgatgacgaggggtacagacttgatacgtttgacttcttcctgagcgcgcaagagttctcgacggaggttgtgcgtttcatagaggatgtattcctgcagggcgaatgacgagagacgttgggtcaagttagctgacggatcgaagcatgtgacgagtagctcgagatgggtcggtactcgcctcttgtaaactcaggaaatctcgatgagcctctagctttttgtatttggagtactgatcatcctcaggaagactctgaagcagagtctgcttctccttgacctcctggaggatggtaggctcctacatatcgtcatcaatgcaaaagcaatggagatgatcagttcggcagctctggaacgagtagacgtcgtgaccggtggacgtgacttgcctctttggcgatatcgataccgagttgatccattgctgcgatagtttccttaaaaagtcactttgacgggtttgcagcagatacaaagcgactttgaaccgatgtcaagaagtgatgaacttgtcgttctgaaggtaccgtctgcctgataactcgatgaacgctcgcgtcatcgagcacttgggttgcagctggcagcccttgttggttagttgataacgcataagcgatatatcatgtttatgcgttctagccgtacttgctgatcatccctcgtcgcaggctggtacaagtaactctcagtactggacctgtacaggagggtacttcaagatggccaggtcaatcaggaaaagcccgagaattcgatcctctagctttttgaagaacttctttcgatctcaattagagcttactcgataactcgagaaatctcggaatctcgaggctcaacgggatatatatccttactcaacatcgactgtcaaggagtgagacgaaccatagaatttaaattcaatacgagcaacaagctgacaagttacccttcttgttccgcgatgaccatagtcgggcccaaccgacgcttttcgccaccatgcagcctaacctcgcctcccctccaccaccacctcccaagaaaggcccctcaccgctactcttcctgggactagtcctaggaactaccgggcttttcgcctatgttcttgaccggaaatcgagggtcaccacagcttcgtcaaagaggttacgcgctgcggacgtcgtcaaaccgggaaactggatgggggatcaagatcaagaccgtgtcgaggatccagagattgagaggaacaggaagatgcaagaggcgaaggaacgacggttgggagctgtcggtggtggtaccaacgcgcttggtggaggttgggagagcgtacggtcgccaggggtgcagccgccttcgaccatgccgcccgagttcaggggagaggtccaaaaggggcgggaaccggtccgagaggaaaagagccggctggtttgatctcggcatgatcgatcgaaatgggaagcggacggtcgataaacgatgccggcgatcttggagcgtgatgggcggatcatcggaaaggtggccccacggtttgcgcagcaagttgaagccaggcgggaaagcgatcaaacgcggatttgcgaccgtgatgacagggacaaggatcagtctgatcagggcgatattcagcatctgccggataggtgtggtgggaagcggcaagttggcgatgccatagattgacagcggggaggacgataccgacataggcgagcatggtatacatcctctgctcgtcgatacacacccgaatcatgcccattcggtcagcgtgactgagcgttcggaggtcaattctgtgatgcgcggcagggatcgaccatgcgcagagctagccaaaacgatgcgctattcgctgtgctgtgggctgatgacacagacaggcggggtgatcgacttgacgagaaagaaccgggggacgatcgactactctatagcaaccgccactcctctgttcactgcatcgtttacgggaaagttgccaaaccaccgttaggaccacaaggaacgggccatgcatcaccaaaaggagtccacattgaaccgattcaccctgtaccgcttaccgccaaacaaacagctgtacacgtgttctgaaccataatatgctagcgaattctgtgcaacttgtacatgcatgcaccctctgggtacattgtccggccatgtctatcacctctatctgcatttattactgggaccgacgaaacgttacatgtcgaaatcagagtcagagtcctcgtctctccgcttgctctttgacatccctcctaatcccaaccccgtcccaccctgcctcaaccctcgcatcgctcccttcttgcccatcctcatcgtcccaaactcgacatcctcgtcatcctcctcgtcatcatcatcgtccgacccatcgccggtcctatggctgccgctagtggccttcatcaacgactcgctaggcttgtccgcgatcccgttggcgagcaagaacctctcgacgtcctgtgccgtcgtccgcatcccctgtcgtggcagtccgacgagttgcccgacacagtccccgcggcggtagagaaggagcgtagggtggttcttgtccgggtagttggggatacattgagggccggggatggacaggaaatgaacgaggggttggtgtggtgagagcgtgttcaagaggttgcgcatgtggtccgatgcaggcatcctagcgagctcaagttgagggtaggggtagttaggtcgtcattcgtcatcgtcgagtgatcaggccatcgtgccgacccgtgcgacctggagacgtgcgagactcacccgtctttgaagaggaaacataccaccccggtccccttgccctcttcatcatcaccctcgatatcccgcttactggcctcgctgacttccttgacgaaatcgtcccgacttatcggtcgaagtccatccccactcttgacgctccgggccatggcgtcggcgtgtttaagctcttgcagtttcttgagacggtacgactggaacaaccgttcgtcatcgctattgttggcttcttcctccatctcgcctagcgcaccggccgaggcggattggagcgcatgttggaagagctctgattcggaaggtaggaacgtcgagggagaaggcggggtagggggtttaggagggatgatgccgtgtgcccgcaaggcatcgttgctagcatgtcaacccgagggtgaggtcacaatcagctacgagtcgacgtcgagtcacgggtgtaaggggctcacaactcggtatcggcgttgatatcgttgatcatggttgtcgtctgggttcttgttgcaaggctctgtgcctagaatagagtaggcttgtacgacgactacacttgatgatgtcgacgagggtgtctacctgctacctaggtgctctacccatgcgtgtcacgtgactttttgtatgtttctgtcgactttttggatccgaaactacaacttcgaccactttgtctcgagggaattcattatgaattatttcagtcgtacatccactcggatcacctaccccgcccagtccagtcattcaactcgacacctaaagtctacatgccaaccatgtcctcaagagcagccatgaggaaacaaagaacgaccaccaacgccgtggcaagttccagctcggcttcggggtccgtcctgggaaagaagaggagcaggaaacaacaggaagtcctcgagcatgacgacgacgacgacgagttgtcaggcgttgtcggagctggcaagcaggtacaggaagttgatggacaatacgacgaggacgaggacgatgatgaattcgagatcgataccggttcgagtaacggcgatctggatgatttcgtcgtggccagcgaagccgaaaatgagggtgaacccgtggtggcgtccaggtcgtcggccgacacaaagaagaagaatgctaaaagggtcggattccaacccgagaacgaggacgatggtggtctagcggattccgaatccgagcaagattctcaggcgggactcgacctcgatgacgatgaggggtacaactcgtccgacattgacgctctggaagacgacgacgacgacgacgatgtcctcacccccgccacctcggtcagctccaccccggatctagaaaccctgatcaaacgacacacatctaaaccctctgaagccgaataccagggtgaccgatcggtcatcaccggtggacgagccttgacgggtgacgggaggtggggcacggacaagttcagttcggccaaggaaggatcgggcaggttgagagcgagtaaattcgtcgaagggagtttcgtcagggagtacgacgagtttgaggccggttacgggagtgagagtagtaccgaggaggtgcgtttcagagtttcggctgttagcttcttgatccgaccttgtactaatcgcctctccgttcgacgattgacccgcgcgatgacagaataccaacacgatcggaaacgtccctatcgagtggtacgacgatttaccccacatcggttactcggtcgatgggaaaaagatcatgaggcccgccaagggtgacgagttggacaggttcttggccaccgtcgaagatcccgatagctggtgagtagatgctcgtgtcgccgggtccgatacgcaacaaccagatctgacacacacgcacacacaacctctcgatcgtcggtaggaccacggccgaggacaaactcctgcaaaagcaagtccaactcagtgacaaggagctcgacattatccgtcgactcgaacgtgccgaaaacccagacgctgggttcgataattatcaaccgacgatcgagtggttcacgggcaagggcaacgagatggtcatgcccctgaccaacaggccagagccgaagagcaggttcgtgcccagtaaatgggagcacaagaaggtgagccgcaaatgacgtggccgaaggtgaccaggagagggaaatcgagactgaccatccgtcatttgctccccatctgcaggtcatgaagattgtcaaggccattcgagagggaaggatcatcccgaaccgaccccctgttcagaaacccaaggtgtacgccatctggagcaaagaggatcaggaacggaccccgcacgccatgtacatgccggcaccccagttgcctcctcccaagaccgtagaatcgtacaacccgcccgaggagtacctgtttgacgagcaggaaaaggccgaatgggacgcccaggaaaaggaagatcgaaagctcgatttcgagcccaagaagtacgcctcgttgaggaccgtgcccggttacgaaggcttcgtgcaagagaggtttgagcgatgtctcgacctgtacttggcacccaggacgaaaaaagtcaagatgaacattgatcccgaatcgttggtgcccaagctgcccagccccaaggagttgagaccgttcccgacgacgagcgcggttcagtaccgtcatccggccagctcgagggtcaggtgcgttagcgtcgacccgaggggagagtgggtggcgagtgggagcgaggacggcgtcgtcagggtctgggatttgggtaacggacgagaagtctggaagtggcccttgaagatgggcgccgtgcaatcggtagaatggtgtcccaaccgggacgagtcggtcttggccgctacagtgtgagtcgaggtggacggggttgccccaaggagcgaatcggctaacatcgactggcgctgattcccaggtccggtcgagtctacttgctctcccccttggctctggtctcgcccaacgtggcccagacgaccctcactcacctcaacacggcgttcgcctcgtcctcggcgacgaccgcgcagaacgaaccccgcaaggcgcccgacgccaagtgggtccgaccgaccgaggacgagagggaccgagggatcttgatcatcgtcgaagtcgccggaacgcccaagcagatcacttggcaccgcaagggagattactttgcgaccgtcgccatggacggtgagtgggatcgtgctttgacatgtgatacggtcgactgacgggcgtacgttccgcttgtagctgccaacaaatcggtactcgtgcaccaggtctcgaaacatcagactcaatcgccctttaagcggacaaagggtagcgtccagcgggtcgcgttccaccctaccaagcctcactttttcgtggccgtgagtaacttctctggctgacgcatgcagcgaggtgactgctgaccatggacgcctcttgcagacccaacgatacgtacgattgtacgatctggtcgggcagcaactcctcaagaccctcatgacggggctccgatggatctcgagcatggacattcaccctggcggtgacaatctgatcatcggaagttatgacaagaagttgtgttggttcgacctcgacctgagttccaagccttacaagactttgaggtgcgtttaccgtggcgtcgcacacgctcgccctgctgattcgacccgaatttgctcctctctgcaggtaccatacgaaggctctacgatccgtcatctaccaccgaacataccctctcttcgcttcggcctcggacgacggcacgattcagatcttccacgggaccgtctactcggatttgatgcagaaccctttgatcgtaccgctcaaggtcttgcgcggacacaacatcaaggacggactgggtgtgctggatgtcaagtggcatcctaccaaaccatggttgatcagttcgggagcggatggcgaggtcaggatgtggacctaggcaaagagtctcggttcgcgagtccgggttgtactagcagtcgggttgggtcttgttctgccatctgtatctatcatgttgtcatctactcgcattcatcgacatcagcttggacgaaacgatatccgcccagataggcatgaaaggatcgttcggcaacgcttatttcgaggtttcgggtgagaacggcgctagtgaagccacgcgagaatctctttgttcgtcgtttcatatcggtatcctctgcgatttattgttcaactcgaggaggattcgagatttggtatgcttctgcagatcctcatcctcagtctgggaatgacaaggcaatattgttccctcttgcctcttgaggaagcttgcacacatattcgagaatgttgccaatacgtcgctacctcatatgcccgtggttgagaacgatgatatatttaaacttcgtcgcgtcgttcttgaccattctcacttgacgtccgaacccaggcttatttcctctcctcgcaagaagtgcaacatcgtactccaaccatgtctcgacaacccagagtcgtaatctcgcgggcaaagctcgatagctggaaggccaagtcaactcaaggtcgacatctcagtgaagacccggtgagtcaaggagcagggactgcttgcgcggtccatcctggctcacagactcggaaacgactgtgatgtgtagaacaactattataacacgtctcaaagctgtcatatctgcggccgctatcaggatcgaccggccgagcgcgaggaacattatcgaaccgtccgtgcgtaacaaattccagctagctggatacttcgttgcatcatatctgatatggctggcccccggtacatagatcgaggtgcaaggttctgtgaagattatcgacagtggtcttatggagagtgggcctgtcatatttgcggagaagatcagccggacagtgacaaacgggctgctcattacaagcgataccgtacgtatcttctcctcgcacctcgcctgggtcaatccactgatcacgacacacgtcacagatcccgacgaccgaattaaatggcctcagggacaacctaaagacgcttgccagatcaggtaccaccacaatcccgaggagagacgcaaggtcaggaatcccgtatgcgacaccggtcaagacgccaaggccgagatcatcgacatgagggacatcgaatccggtgaagaggaggatcaggtcgaaggcgtcttacctggaacaccttccaagaccctcctgcctcccatcgacctcgacgcacctaccgtccaggtcgttgacaggacgcctaccaagcctcccgccgcgcttgtcctcgaacagcttagacgaatggcggctcagtgtgcgagtatgccgacgtctcccttgcaatcccagtctgccgccgtcaaagtggccgaatggcaagctcaacttttgccggatgtcgacttggcttcggagtctagaaggcaactcgacacgcaggagcacgacgagatcatcgtcgtcaagaggactcccgaccgacacatatccatcgaccatacagcctcgccggttgcccagagtccggtcgatctccttcagggccaaacagcagccaagccgatcgctaagatctggccgtcccccggcgagagacgcgaggtctcgaacggacgactcaaccccaaacctaccagccctaccaagtcgagtcctccgatcgacaaagagatcgaccatcaagctgggtctccggggaacaaactggaccttaacgacgtgaccactcccgcggagccaaagagtcctcccggggcttcgatcgagaccgcgaacgacgttcgccccaagctggcaagccccagaaaaatacgtcccttccccgaagaagatatccgtcctgggcatcctggtctcaacaatcctagtctcaacaactcggggccgtgtagtcctaagaagaggaagcttacggtcccctcgccatgcaattcacgcggtcgcaaggaagcttacgagcgattcctccgcctggcctcgcaagcaggcaagtctttgatctccctcggcgagaacgccgtgtcgctcgagctcaatgaaggcgccgatattgccgaaacgagcaagcggtccgtcgaagctctttccgacgccgctcaaaccctcgacgctgttcaaggttttggatgcaatgcccaaggggacttgaagcaagccgaggtgttcctcgggtacgcgattactcagatgaaagcgatagctcatcttgcgcacaaggattctctgatcatgacggctcgagaggccaaattcgaggagaagcgcaagaggctcaacgcagagtcggagaggttacggggggccatgttggatttggaggagagacaagccgctctcgacgctaaagagtccgaattggatgatcgcgagactgacatggaaatcaaggtttacgccgaagacgacatggaaggtcgatagccaggaccttggacgagtcgtgtaacataatattatgctccgatatgacggttaacgaaatctagactatctgtacgttcgtaattgcccctcttacaacatgtcgatcgatatacttcatctacttgcaacctgaagaacgacagtccggcaagtcagctcgatcgggttttgtgataccggatgactgggctctatctcgacactcacgttgcgccaagatggccggtccgtgctccttccactcttccgctccgacccacaactgatggaacgtgcccaaactcgccaaaatgctacctcccaaccagaccgaatgtctccgttcgatcgagttgcccggagcgtgaatcttgagcttgctccccgggatcttgagcgagagttcgtggttcaatcgatcggccagaccggggatggtggaccctccaccgacgagcacgatgttttgtaaaaggacggcgcggtgatccgaatctaccgcaaagacgctatcgtggaccaagtcggcgagaccacggagttcgttcaaagggtgagctgtcggtgccgaaggggtcgcgtagagttgttctggcggagcaatggtctgtcaagccggggcggggcgcaatcaccaaacacgtcagtcagctacgggctcgttcgaccaaacccgaccctcggacccaccttgtccaagaacgactctgggttgaaaaggctctctgtcaacctgaacctctcttctccaaactgtgctccgtatccatcagggaattcgtacaccttgcccggtttactgttggccatcctgcgagaagtaccccgggcgtcatgatccaaagcgtaaagtcagccctcgatagttatactcgccgatttttacgcagtgggtcgactcactcgggtgaatatccaccgaccatgacctcggcgcatccttctctccaaccatcgacgaccttgttcgtccagtatgatctccaactatccgtcgtcttgtccaaccgggcttgattccactgcaccgagggaggttgaccgagcgagacgggtttacgcgacttgatgaggtgatgagggaggagggaagcggagggatgcgagtgggcgagaaagttttggatttgagagtcgagcagggtgagggagaggggttgtcgtttggtgcctgtgacgacaaaggtgatgggttcgtgatcagccaaacatggcgggttgcacgcagggacgagacgccggttcgaaaatggactcgcctgaccggatggcgtatccatcgcagaccgggacgacgctgaccaagtcactcccgacatccacgatcaacgccgttcccttgcccgcagcgaacctgtacgcgtcccgtagtggtaccgtcccgtcagctctgtcacacgagaccgagaccttaggggtcgaccagacgtcagactggactcacgcgctcaatacgctggaacaagcgatatacacgcccggaacgccttctccctcgaaagcgacctcggcgagtagttccctcgcctgacgggtgttccatgcggattcggtcaagaggagaggatgctctgttgggtccacggagagcgaggtgtgtagggcgtggtgcaggaggtgagggagggcttcggggtcggtgactacgagcagcaggcgagtgcgtttgcgagtgcgtttgcgtttgcggatcagcgagccagccaaaggaagacgaaacccttctcctccccctgacccggaattcccaagctcgaccgactcactgatcccatcccggagtatcgaacccacttgcatcccctccctccacatgttgaccccctgatcacccataaaaaaccttcgttcgattttcccacgtcgtcccgtcgactcttcggtccggctcccggggagtcgatcgtccgagctttcgtccatcgcgttcgcgttcgcgttcccatccccattgaggtcgacccggacgtcgggcgtcgagtgggaaccccctccgttctcctccccatgggatgaagagcaagggatctcgatatacccataagccgaagggatgattgaacggggcgtctcttccccggcgaacccagaacgggtcgtctgcgtaccgatatcgacgacgatcgccgagacttcgtctggtgcaccgggaggtagggtgggttggcaaggagacgcggggtcaggtcaggttgacgagcggcatgcgggcgaggacaaggggagacttacctcctccgtaagtagcggggttcatctttaaagtcccaggggtggtctcgggatgtcgttaaagtaaggttatagatgcaaagacactgacgggttggtcgcgttggaaatgactgaagtgagcgtgtcgtcaatgtcggtttcgatgtgtctttgcgattgcttgctgttctctttcgccggctgtttgaccgacttttgatacgagtctctagtagctgctcccaggagtttgacaggactgaccgaggttgtatctggaacagtgacttgcaatgacttgtggatgaacccaaccatttccatgtcaagtcgaggttgatctctctcgaatctcgtgttccttaaatcagagctgaacgcgtgggaaataaattttgatggtgctgatggtgatggggatatcatccgtctcatcgacgtcgtacgcaagatagattctttgagaggtgaggctcaggatgtgagacgaggtggtagaatgtatctaacagtggtgttgtaatagtagtggtggtgacattaacactcgacatcactttcttgctaatctctttctctcgctccctggactttcgagcaacctctgagcgacttggcttgctgggtggagatattcatcaactacatccaacgacgacgacgacgaccactctacactcctcgactacagccacagccataacagcagacacagacatacgcacagagagatactcaattgccaggccgccatcgtgtacctcacccgtccctggtattggcatcgaggtctatagacaccctagcccctccccccattcgacctcgttggggatcgagagagaccaccccacttttctctttacatggcgaaagggaaaaagtcgggtgcgaaacaagccaaggcggcggctgccgtcaagcaacaagcggcggtcgccgccgcagcagcagcagcgacagcgaccaacggagagaagcagggacagagggatgaggcgggcgtcacgggtggacatggggacgatgccgatgtcaatgccggtgcaaggcaggcccaggtcgacatgaatggggatcgaatcgtcaggtctctgaatgatcaggatcggacgacaacgacccacgtccaggggaaacgacctcgaccgacgctcaccccggcccagctggcgagacaacggggcgagggaccgttgaccacgatggaacccatcgcgggcatgatggataccgacgtcgatcatcttcagtacatccattcgcacgactatactcagcatgatcagcaacagcagcagcagcagcagcagcagcaactccatgccaaccaagctcgaccgacggatcgagggcatgagccgacccaacctctatccggaatcaactcgtaccccaactacccttaccccccgacctcggttacctcgctccatcaacccgggttccttgccccacccaccgcacccgcctcgtcggcccatggactaggactcggtcccaccctcgtcgtcctggatgacccctcgaacaagtacctccaggctcaacagtcgttctacgcgacccaccctccatcacataccagcgtcacttcatccatccccgacgtcccgcctcccctccccgtcagtctgccgaggttaccttgtatcccccccttggtcgtccatcaggaacaactgtactttgatgacggtctaggcgcaccagggagatgcccgcatgaacgcaaatggggcgagatcgggaaggaacacaaggaacaccgcgggctcggcttgagcgacgtcgagatggacgatttcatggtcgacctaggagacctcgtcagtaaagagtatgacgcgtggatcgaaaggtgttggtgagtctggctcgggtgtgacccccacggttcaagcgggtggggtgagatttcggcaggctgaaaacgattgaacggacacgtcccctcgttcctcgtcctctcgtcgattcgatagggtagaagcgtttcattacacctacacagtctccctccccgccatgatcgtagggttcatccagtgcggatctaccccggatttcctcaacgacaagatcatccacggaggaccctcgatcgacgccctcttggcgcacaatttcaggatcttgctcaggcaggaacacgaacgcagaatgtcggacgaggatgggtgtagacgaggtgtggatataggaaacctcttggcaggcttggtgccggggaccacggcggcaagtgggagtagtgggagttcaggacaagcgaccgtgccgagcgcttcggggcaaggcagcgctcgggcacctggtgtggacctgcagagcaaggtgccgacgactttaaaggtcggttccgatgcgagttgggtgtccaaggcgaagaaagaggctcgggatgcgtatgcgctcagtaacggcggcgtcaagcatcgggacgaggacgatggcgacgaggacgaggatgatgaggaggacttcgacgaagatgacgatgaacgggatcacgcgagatcgacagattcgggcatggcaaaagtggcagacgggttgacggccatgtcgctccagggggaagacgtcggaccgggtgtcgatacgctcccacgccaaccaccacctccaccaccgccgccaccgactcatccgacaccctcgcacgcttacagtcaactccagcccagcccacactcgttgttgaacacgaacccggctctggcgggacagggtagcacctcgaacgccacgtttcagcacccgctgcagcgacacctctgggaccccgccaggacggggtacgggaatggggtgtgcttttacgacctggcgttgttgcacggaaggcagggggacgatcatgccccgtgcatgtgcgacttgacggcgtgcaggacgtgtttccacgagttgctctatttccggggaaggcgcgagctcgtccaccccaacgacgatggcgaggacgacgaggatgaagaggttatcgagggtgatgagatcgaggacgacgaggtggacgaggacgacgagctggcgcaagaagctgacgagcaggatgatcatcatgcgcggcatcaccatcaccatcatcatcgacaccatcgacaccaccggcatcatgaagacgggaacgacgacgacgatgagggggatgaggatgaggacgagtatgacgagggcgagtgtgattacgatcatgatcacgacgatgacgacgaggatcacgatcatcatcaccaccaccatcatcatcaccatcatcacgaccacgctcactcgcacgctcatgcgcctcaaggttacgctcgacgggcatccccgttgtccctcaaataccccgacctcaccgacatcatgctcgtcgaggagcatctccggacaaggttacattacatggcttcccccgatgtagtcctgcggtacggcgacgaggacgagtttattccacccatggagtacgtccccgtacccgctggcgccgccaactcgaacgcagggtccacagctgggacgcccatcgacgaaaaggccgacgccttgtcgagcatgagcccatcgtcgacacccctcaacgctgccgctgccaagaagggtccgaccaagaaaatcttgcaagggcgcaagatgaagggaggtcgagtcgtcaagggtgggatcccacccaagattgtcactgtgcaaaaggacgagccgaacgggcccagggtcaatggcgatgcactcaccggcgaagttacaatgaagccccgtttgaacgggagtcagttgcccctcagctggacaatggccagcgcgaccgtgcgcaatcaagccgtcatccagacgtacaggcatcttgtcaaggtgggcgtcgggaagtagcccgatcgaccgtgtctgcgctctaatcgcgtgccaatctctgctttcagctcctacataccacggctgaccgcacgtcgccgtttgactttgacgagtatgctgatgacgccgcggtgctcaccgagattcatccgctcgccgtctaccgtcgactcgtcgaaccttatgtgcgaagacgagcagctcagcacgaagagatgaaggctcgagccgaggcggccggcaagactctcaattacaaggagatgccagggtcagaagtcctcaaggtcgactataacgcttggaagaattgcatggaaaaatgggaaaaggaagtggccgtcagggaaaaagaaggggtgagcgcgggcacttgtgacgatgttgggtccgacaactagctcacgcgccgatggttgatttccagggcaacgccatcttgaagactcagcccgcgagggcggtcgctttttacactcaggcgatttgtctcgatagcgaaaaccccgtctattacctgaaccgagccgtgagtatgatcgctcggccggcaacgctgatcaccggctgaacgttctctatggacccctctgcaggccgctttcaatgccattgaaaactatgaagacgccgagatcgactgctctcgcgcactgaccctcaacaaatcccatctcaaagcatggtaccgccgtgccatcgctcgtaaaggcctcggcagactcgacgaggccgaacaaggcgagtctcggcgcgttcttacctgtcatcggcgaaactaacacgacaggacccatagacatgctacaactcctctctcaggcgcccaacattcaggcagccacagcggaactcgctgcgatccggaaagagatcgaggacatgaagaagcgggaagaggtcgacgaggtcgactaagccgcggtcttttcttttatccacaacggctgtatcatttagcaccaacattcttgcatcagcatgatcattgtcgcattgactgtgctgtttctttggtgccgctgattgagttttgccgcagggcttcattcggacatatggcccatagcttggaggtgggagacgtcatcttgtgattcatacatcccatccgatcaacaagttgtctatcagcctcgtcttgcccagccacatcgctccagcgaccacagcttccctcccacccaactctcccctgataggctcgaaagtgaccttgtcaaagacttcaatgtagtcgaacttaatcaggacatccgattcggtggaagcctggacggcgactttttcgatgagatcccgggcggcctgaatggcggagtcggccgtcgtcgacgtggtcgtcagcgaggtttgcacctgagagagcgctcgatggagggtaggcgcatagggtcgttccgtcgtggtgaggtaggcgttacgtgaggacaaggcgaggtggtccgttctgtcccgtgtggtggggatgatatgcaggttgtcggatgtgggaaacgccatcaagaggtccttcagcactgtaaggaaatagcgcgatcagtctggcgacacgggttggaagccacgctttatacgtactgatcttgaggagaagagcctgttgaatatccttttgaccgaaatacgcgtgatccggttggacggcattgaacagcttggtgcacaccgtcgctacccctcgaaagaattgggctagcgattcacatgtcgaggtcaggtccgcccctccgatggataccaccagtgtaatcacgggcagactcacgccgactagcaccctcgagcacatctccccagcctttgacctcgacgaaagctcctcgctgcttgttgacgtcttgtagcatcccctcccctgtcgacccggacgccgaggccggggcgggtagactggacaatgggtacatcgtctcccggctcggcgtccagactaccaatttgtcaacctctttccccggatactccgaggagaggagtccttccagtagttccaaatctcgagctagcgtccgagggtatgaggagagatcttcgtggggtgcgaattgagttgggttgacaaacaatgtcaggacggtcaaggggttggctcggagagagtgccggactggactggtacgatatgcgcggtggtcagtcgcagggacgaggtattgcggaaatgaaattgcgcaccgagatcgaggtgaccctcgtgcaaggcacccatagtaggcacgacgccgaccgacttgtcttctttgaaagctcgctgacgccatgttcggaggtcgggcaacgtcgagatggttgggatcaaggcagaggctggccggctcgaggacgacatggtgcgagagaggtttcgtgtgaattgaatggaccgacggagttgattcatggtgcttttaccgttggtatgagctaagaccaagacatttcaagcagatgatcaaggtcgaagttgctcgagttgaacttttctgggtggaaagtgaacccaaggagtcaccggatgaaacgagatttctagcgaaaacgcggaaaatcatctttgagaagagggtctttcgaaccggtcgacaaccaagcaaacgccgagttagttgcttgtacttggaagatatagttccagcagccgactgtcggagcacagaacaatctagttgcaaatcaagtgcagacaagcgtaccatcgatctcgacctgatcatttccgctagaattctgaccaaagtcctcggtcgagctttgttcggaagtaaatttgtgcaaggcaactatcaattcaagttcaaccgtattctcaggtgcatctctctgcctcctgacggaagatagagtctcgaagcaataaattctacaactgacgcagtacagcttcctgactacgatttcactcggcaacaagctgagagattccttaaaaaaaagcacgaaccggacgaaccgctcacaacttctggtacatactctcggtctttgggttctgtcatcaacctctacctcagctaaaagatgtctggacgaggaggacgcggaggacgaggcggtcgagggggtcgaggaggaggattctctggatctgatcgaccacgaggaggtcccgaaggtgtagcggttgggacactgacgcatgcggatctccagaagaccgtcaaggccgagaggctctaccctgtaagtcccgagggtcgagacgttgccaatgtactcgtctctctctgaagccgagtaaatataccctgacgtatacaggagtaccagttgaaagagatgaggaacccggacaaggcagagtcacgggtctgcgtgttcacccgggagttggcaaagagtctgcggtatagtccttaccggctgaccgacgagaccaacaaagacggtcagtcgtccgctgtcgaaagagcaccgaacccgcttcttgtactgaactccgcccccccccccgttacccttccctttgcccatcaatagacatggcctcgtacacggacaagtacaagcagaaaaaatccctcaacgcgctcaacctagacgcagacgccctaggcctggaaaaagatttcttcccacgacaagtctgggagatgtatttcgagggcaaggatccggaaggtcagtctacgggccgatcgcgcggggtgtttaggagcatgcgaggctgacttgaatcgggggccgacgtctgggcgggggcacaggtgcaaagaaggagaagaagaagaaaaagaagaagaacctggatgatctggacgaaggcgggcctagcgaagaggtaggtcgcgacctcggcggcgttgtacttgctaacgtgtcgctgatgtatcgccgcttgtgatcggtaggaatactcggacgaagacgtcatgctcgaagaccagttgtcggaagaggaagactatggggaggacgactacgggaacaactactttgacgctggcgaggaagagggtggggatgatgatggtggtggcggcggtggcgacgaattctagatgcgactcttcgccaggataaggtgtatgtatgatcatggtagccgtcccgagtggcgggtgttgtattcgtgtgacaagttatgtgacaattggggcatcggaggtggctatctgaacaggaccttgctgccgtccatctttcctcctagcgacagtatcaactcgtcaggcctaggcaagctctttggcccgcgcttcaagtgctcatcccactcgtcctctccgtcagtgatgtctgtgggcggggcagtttggtttcccaaaagactcgctgcgaaatccaccttcattcccattgcccagccgctcttcatcaatccccacgttcgttcacgcagccgaggcagtgcatagccgatgaccatcttctggtcgtacgtcaggtcggatcgcaggatccgatagtatgccagaggagacggctggctgatcgctcggtagacgctgagggcgagccggatgtcaggatcttcaagccgtacgaaagctggcgttcgatgcggtcctttaccagtcggttgagtgagcttgaagtagtcggtccagaagtcgatggcaaaatctcgatgagcgatgtggtacatcagcagcaggctggcaaagtaggcccgcttgttcgccacccctcgttcaagtgaaaggctttcgactttggtttccagatcaacagtgttgttggatgttgctttgaggtatattccgggtaccaacaccgataaactggagatgagttgcggatgattgcccgcacggatcgatagcaagctggataattcgtagactatggtccataccgatgaataagccggttgtgatggtctaaccgacgcggacgaaggcttacctttgatggcaaacgaatccatacgccggcttgctattacgccttctcgtagtttgcctttagcacaaggagcgtcagtgccgaattcctcgctcgatggccattctggtgcacacacggaggtgtagcaggataacacccagcgattctctgccgtccttctccgtcgcttgatccgcttccgatagaggatagagaattcggtccaaaggatccccttgcttgaatgagggaaaccgaatataaaaggcttctagctgtcgagcctccagagctgagctatgcctgattggagtgatgaacgttcaagacaaacgcaccttgtcctcgatccagccgaggaacttttcctgtgtcacccggtcgagcaatccgtcgccctctccgtccccagtcccgcccgaccgacttaaagtccctagcatttccatctcgtccaatttcttgaatgcgcgatgagaggatgagatgggttggaggtcggtcgagggggacgagagggaggtaggctgaatggcttgagccgggcgggatggagtggttggcgcataggccgtgcgtggttgtacctcggcatcgttaggccgagctggtagtgtactatgcgggaccgtctgacggaaaacgggattcaacgaagaccgatcggatctcggttctgaagctttcggagttgaccgatatatggttggcgatgaagttggtggtcttgagtccgatatcgggcgggaagaattcggaggtccacttgatgccaaggtcgaccagatatcaccgccggctgtactatccccttgggaagctgtctgccatctggaaagtctatccgattctggcattcgcacggcacctgctcctctacctcttcctcgtccggcaggaaagctctgtccgcggttgtccgttgtgtctcgccacgcccgagtcggttcgttcccggtgacagtctcccgtgagcgccatgtcgacgctacgtatcggtcgctcatagtgaacgcagaccgatgattcgtgatgaaatcgaatctgacaggtgcacatcaagcatcatatcaggtgagagtagatgactactctggagtgacgttatggcgcaggtgagaaagcggacatcaaacttatttctcatgtccgtgctctctcgccgccatgcgaggcgcgctttactcattgcaagtggatgttttatcttcgagaattgcaaacggctggatccccagtacaacaacacgcatgaacataggctgactaattctcagcacggatttgacggagcctgtgcttcggaaaaaccttcgtcagtggtggcaaatcacaccggcattagcgaagttgatcaactccgcaggttgtaccgccgagtccagttgtttcacccgattataccaatccgagaagtcattctctctgattgcctgcgctgaaaggtcgagacatccatcgcacatgtccgaggggaaggccaggtatcgccgcaggttttggtaatgtctggtgaccgggacgttcttcaccttggcagagccttcccaagggtgacttccagtagcgtttgatggatcaggcgtcatcaggtcgtctccaatagagcctgtcgacgtatctctgtccccagtctctgcgcctcggctgaagttgctgctatgatcagtcggatcgaaagctgacatggtatgcggcgttgtgtgatgtctggggctttatcgctgaaagatgggccggatgaaagaactttgcaatcatcttgggtctttataaaatggccaaacttatgtagtcggtctaccttgcgatactcatgacatacctgacgataaagggacatttccacaaaggaagcggtatgtagggctaagagccaggcgtgagaatctcatactagtgtgggagaccccatgaagaaaggggaaagaagggagtaacgggtcagtcatcgattaccgatgttctctcggtcatggctattgaaccattcgctggcgcaaaccgatactacgggttgacgaaaagcgatgatttccgctgcacctttctggcatactgccctcgtagcttgtcaatcttgatcaatggcgtccttcgtctatcacatcacacagcgaataaatttccgcctagacttgcacagacggtggtcaacgtgtatgatcgcaacccacccgcttataaccagagtggacgtctggcccaaatttcgctcattctggccagcttgacttgtcctaaagccgaccagggagattcgctgaaccggaccatttgctgatgtcgataaccaatatgcgattacatgcattcctttgtatttgagtgttacggctggaagttggcaaaaaagcgacactgtacacattcagctgattaaactttccaattattctcgacatcgtcgtattccttcagtgttaaccttatcccccctatccctggctcgttcccgaggatccggttcctcagctccttgctatcagtctggaatgccaagaccttgaaacccatcgtaccgccgtcgttgccgagaatacgctcgtatagccatgaaatttcctttcgctgggagttcgcaatctcgggtgacccaaacttcgagtctttcaagtcactgtggatgcagaaaatagactgatagctccgcttgaagattcccagtccaagtcctctgcaaatttgccggaactcctgctccaccttgggctcataactattgtcactgcctctcgccttgttcatctgcactgcatagtcgtccaaatcagccgagtttaacgccttcgacaggcagtcgtcgcaaatcgcgtgctctaagcctttggtcgcgtcgccaatggcagctttaaagctgacgacatgcctgcgtatacaccgcataccagagatgttcctctcgtcgggcgatcgggggtcctcattgatggtcactctaaatggaccagcgttcctagctaattcaaccggagcctcacccggttcggcgatgccgctttggctaggaactcctgacgctaggctactatcgttctcgcgggactgtgtagtgtttgaggttggtccggaatctgaataggattgaaccaggttactcgctgcggtcagcacagtctcaatgaagctagaaacgccgctgccagtaaccgaggagggcgacatcttgaagcttgatacaaggtgtcgacctatcggctgtctcatggctcgcgcgatttccgcctatctcttgcttatatgcgcgttgcgagggcgttgaaggcaaacaagctcgggtttcctttgatgaaccctgtcgagctatcgatgacgagatcatgaaacaggcgcgtgactggtcgggtcttcatcgcgtcattcttgaacgataatggcttatattgagaaccctggtcatgcgccacattgaggcgaggagacgatcccgcgaacggcgccatcttcactgtactgcacgtcgagaagattctactgctcagcactcgaacaatccgggatagctgccacgagcactaggatcatcgattcaaccggtttctcataacaagccgtgaggtctcgcgcgatcctctcacatatagtcatcggctatgctaacgcatggtcgaggtgggacaatgaatccttcagtccgaccgaaccatttatcaatcaagcgtagcatcgctgctataatcgtcatctcaaaaatctcccggactcagcactttgcgggcttggagctctatctggaaccggtggaggtcgtgatgaaaatgcagtagcctggcgttcctatatcccggtgacgcgggaacgtccaacctccatagacaccaggccttgcgcatgttttccctttcctcggcttcgcagtcttgcttagatgggccaaacatcagagcggcatgcatgcactcccaaccattgttgtcagtcggccgatggattcccttaccaaccaggttgccgaacaattttgtgtaaatggtctcgttgctgtgctgattgcctttgtgctctttcctgtattgaaaggtactcgggtccagatttccccacaccgcacagcctggtactcctagttccggagggtgaacgtcttgggtcgttcggagactggcaagatagcacgaatcgcacacgcgatgacgggttcctaaattttgctgaaaaagcgcttcggtaaagctgatcaccttgtaagagaccacatatcccgcatgcaacagatcgggcactatgaaatgttcctcatcatcggatgcgagtctgcgaggtagttccgcaccgttctcgaaccacccagtctcgtcccgccccgaaacgttagctggctgtgcgaagccgccccatctgccatagagaatcgcagaatgtcgctctgtgatgtaactttgggcagatcggctctgagcagagaacgaatagcggagatctttgtcgcttgaatctggctgctgtgcttcttctgttgtagaaagcgaaccggttagggctgtcaggatggatgtggccatcatgctaactctgtatcgtgatgttgtcgagttatgagaaggatcctagcgtcccagcgaccccgtcacgacccgatggagcattattataccggttcaagtgtgcatggatctggctgtgtcatctgatttgatggtgaaaggaacactctgtgatgaatatgcgataggtcagcgcaaagcagcatgccccaacccaggaagcgcgcgagtatcatcagtttcgatagatcagcccgcgattgcgtatgaatctaaatgatggacaacctgagcaaagccacctcatagccgtcgtccctgcaccgttcaaacaaacactttcaggccttgtgacttcctttgaggcgtagagacggtattcacctagtgtcgccgccgtatgtcggccgagacgggcgagtctcgctgtctttcccgtatcggcgactgctgtgcttgctctgaagcaatgtcgagattatgcccatgccaataccaactcgaaggctgtatccgcgtccatgcccatgtcgttactttccaagaggacttatttgttgccatactcctgtccaacaagctgatagtcgttccttatgtcggcagcgcgatggctgggcttgagggactgaccgctagtgtcttttgtcacgaggatgggctactacgataggcttagagctagaggtccagggtgggagaagagccgagcagagatgggagcacgtggcctggtgtataggctgacccaagccgagtatgatgagctcgagccggttgacaaggtgagtctctgatttgctggcgatgaatctcgtaaacaacgaagcctgaggacgaagagaatcgaagacgacgaatcgaatgctgaagacgacaaattgaatatcgaaggcgacgaattgtatatcgaagacgacgagtcttgacgacaacgaatctcgagtcgctgattgctggctgctgattgctggctgatccttcttgtagcgcaaggagatttggtggcggttctgaaaaggaggtagagtcgggttggcgatccaggtccgagtgtctctgattgccctggcctgcaagtttggcgacgcatgggtagcactctggtggctacccaaacaagatattgcaaggtggtaaagcctgacctgcctcagcttctcaagctatacaggcaataacaccagagggatgaagctctgggactgctgttacctccggccaaggctggagtttgggccatagaggaatggtttatcttgggatttggagacgccaagttggggataggtcgcgattgcgacttgaatatttggcctcgaggtttgtcgtccccgtgaacagtaactaacctctgcccgaacactcgaccccttctacaacctacctgccctacagcgactgcgatcccagaaccagcacgtagacggacgtgatattgatcagcattatgccgtagcatcaatgttgtatatttacacggcaggattcccctctgcgtgacatcaatccctcattcggccgcctgtgctgcggcttcggcctgcttctccagcttcaagcgctcctcttcttctcgctcttccatctcgaccacctcgacatccagggggtacgtcaggatagccgccacaccggtcagcaagttcagctctgcgacgaaaggggttcgtgagtgtgagcgttcaatcaggacaagaccctattcttcggtggcggctcacgttgaccagactcgtgcatgctcgaaaagatgagtgattcacctccccgagcgcgaacggcttccaccatctcgacgtatcgtcttcgtttagccgagtcggtcgacctgtcgttcgatcgatgcagattagcacgtggaataccatgactcaaccaggaagacactcgcctaaacagctcgtccgagatcaagagggttcctacggcgcctcggtcgacggcaagtgcaacgtggtccggtccataccaggccctcagctcatccgatccgagcatcttgtggaacctgcgtggcgtcatcagaatacgatgtttagcgtggactgactggcgaccaatgttccggcatgtatcttacttttcgagcatgaccccctccttggcaaacttggtcccctccaacaagcccttgacctcgggtccccgtagtgcctcgacgagaccatgtacgtggcttgtactgctatgtaccttgacccatttcgttcgggattgcaagaggggtttgttggctgtcaaggtggcttcctggaagacatagtcgaacatctgtagggttcaaggttaggcatgtcagcttccaaccgaatcgaccaggctggatcgaaactgaccccttctcgggtgaagccgggactagcaatgacgatggctctaagtgtttggaaaggcaagtgtcgcagaatggctgcatagacggcagcgaagaatttctccatggcctgggcaaaccagtcgtcatgtagtcagctacatgaaaacgacaaatccggtaatacagagatttgctcaccttgtcatgtcccgaaacaccaccggctcgtttccgagggatcgacatgtcgatccgttgcctgatgacggtcatgtgttcggacaacaggcataccgcagccgagcctgttcgatgagcatgctgcggtcagcctcactcgctgacgacgttcgatacgatatggaaagccccaccttcaccaagtacgacggcaccgacatcagctccgcggccctctttcgtcgcgtcctcgatgacctcgagagcgacgctatcccagcctccttcttgcttgtggatagaaaaatcccggttggctgccattacgaaataaccgatgaactaccgatcggacttggtccgaccgattcgccgctcaccctccaagtcgagcgtatgatacgctccaagcttgacatagtcattctcgttggtcacggtcccgttgatctgcaacgtcgctgtcgagttgcgagggtcttgcgaggtagcgctcgatccggtgacattggtcgtggatcctgatggagctgccgaggtggagaaagaagtctgtgtggcggaaagttgtaatgttcggcttgtgctctatatgagggcattggcgagaatggggcttacttttttcacttgaatttgaagattcaggcggacccggaacgaatcggtcgtccctgtcgacgaggtcgtctgtactcgtctacacaacgaagggatactttagtccatgagattgacattttatctcccaatcttcatctagatatacctcacagcaggtgctcgaacttcatctccctacagttggcggaatccagccgatttgagattagctcgccttgcgatttaacctatataaattcgactgcccaggcttacctcggtgatcaggttgtagacatgccacatatcctcgtcatcctctggtctcagggtcacgtacccctgtttgcgatcgagctttgtcagccttaaactcggctacacatcacttgattgccattgcacataccgagaggtttcgttcgacgtgcttcttgacgagcttcatggtggggactttgtggtgagtaagttactttgccagtagagtgatctatgctaccgaggatatatctacgtccgcttgcaatagttgaagaagatgtgtaccagtcgtggagcaagcagatatgttgagtaggattgcaaagagcaaagtagttccaagtttcctcctcgacttttgtaaactgacgtcacgctttcgatcgcgaagggaaaggactcggacttgaatttgctaggagaattggcactcttcttcagatcaaaacaggccataacttcatcctctcgcccgtcacagggcacctgagcatcactcaggacgctcttgacaaactgaggaagccatagagatgttatgaatgccccagactaccgagtgtaagcctagataaaaaccgacttttcggtgcaaggttcaaattggcggaagcaattctaagtagaaggggggcactctgatcctggttgatatttgatagacctgttcgcattcaattcgaatggcatcccgatattccattccagggctcagctgctcaatgcgatcatccgcctagaagactcgagagcaggccgtccacgctggtcatgatccgacccaatacatagcaacggcaagccggtaccggtttgtttacggccaacgaggtgtttgtcaacaacagcagtttgtgagcagataaatcgacgtctccctttagacctggaaaggcgatcaaccgatcggcgcgatcggtcccgtcctcaccagaataaagcgttacaagaaacctgcccagcatggcagccccggcttcgcaaccggttcgatcgacccttctcgacgggaaccacgcctttccccccttttacgcctgctacctgttgcgaagcaagaccaaacccaacgtcacgtacatcggctcgtcgcctgacccgccaaggagactgagacagcataatggggagatcactcagggcgcgcatacgacggctagatgtagaccttgggagatgcagatgatcgtctatgggtgggttcagcggtgagatgccgccattcccgtatcgtgttgacccgttgtcgccggtttcgtcgacagcttcccgagcaagttgactgctctgcaggtgggaaaaactcgtacgaaatcgataaactctcactgatcgatctggctaccgcagttcgaatgggcctggcagaaacccgacttgtcccgtcacctaaagcatacgattgcaacgacccctacggccaccacgaccgccggcccatcatccacagagacacccgctgcaacagaagtcctcaaacccatatatccgaggaacgctatgcgcaaccggatagaaaccaagatggccgtggcgaggaccatgctgacaaaggcgccgttcaggagatggcccttgcacatcagggtgtttacgccggaagcttggcaaatctggaacgagttcaagctcgtcggacaggtagatcccgagcctgtgcccgttattcgaccgaaggtgaaaggtgttaggaaggcgccggtcaagaggaagactacggccgatgcgcgcaggttcgaatcgttgcccgaagtggccaccgtcgtgctcgacctcggaggagtgtttgggcaagctccaggtcggacggaggcgacaaggggagtgaccaagctggatgggccgatcgatgtcgaggataccgatttcaggagcgtcgtctggcaaaagtggaaggcgtttcgtcagagacagcctgggaacagcgggagttgtgcggtttgcaagggagtgatagaggatatcgatgtgagtacagtctcggccgggaaagccaggcaacgaggggtagctagactcatcgttctctctcgcatcaggaccatttgaacgtcgccttttgtaccgcctcgaccgacaacgacgcagactcggacgagtgctataccgtagcacacttgccttgcatggccaagcactatcttgcgaaccccgcctcggatgaggccaagtcgggcaaagtcgtcaatccggttctgccacataccggacgatgtcccggctgcgagacgcgtaccgactggggtgagatcatccgcgccatctatgcaagaagggatggagaaaaggaggatgtgcagttggcggaaaagactcggctcagggatatgaaggcggccgagcttgccgagaagaagcgcaaggtcgaggaggacaaggaggccaagcggaggcaggtacaagaggttaaagctgagaagcgtcgggagagggagctggaaaaggcagccaaggcgaagggaaaaggcagagcaagatcaaaggtcgccgattcgagcgataccgattagcaagggcggatcgggactgggccgctcccagtacggagtttactctagtgagacatgtgctacagcaggcagtattcgccttgccctatcgaaaggacatcaatgggcgatgcattcggccaagggaagtctgcgattcgcttaggccaaccatcgcatgtgccacccttagcacatcaacttgccatcctcacccccactaatcgaatgctcaaattgcgacaagacgcatgacgttggctcatgatcggtgttgatgatcccgtgatcagggataatccctcaaaaggccaggatcccgggcaagccgtaggtcatcagcacaatcgaatagaagccgccgaggcaggatgctgcgacgttcgcggtcgaaggattggccttctgatcacgtgtcagtcagatcacaaggttgagatacagaccaccggagaggcacatcgaacgctcgttgaggcaggacttttagtcttgaacgtgcgggtttccacgtcaacaagacatccatcgttccgcgacctatcaacgtcatccgagagtgtactattgctactggtttcttcggcgatgaggacgagtcaagacttgcatcaggcctctgatagatcgccacggggaacgccgctccgacctcaaaatgacaatcatcgtaattcgtaattagctcgtcgcacagccatatcgtaaaagtcgtacacgcatatcgtagcagacgggatcgaacagatagaaagccaatgatatcagagttgatcggtggcgagaatggatctccctccatcatcggtgatcctcctcctggtcttgacgacaatgtagccacgaccgagttgcccgacttgtttttgcgccggttggctcttcttgtgtacgggcaacgggacgttccagccactcagatcctgtttcggactagacgagtgcgaagtcgtatcgatgtgaagcttggacatgccaatatcaacccgaggctcaaagacattctcctcgataatgatgtccagatcttctgacccgaccgagtcggtgtttccgtcgtcatctccgccgtcgtcgtcctctccttcgtccttggcatcctttgccaagtgcccgctgtcagatttctgtccccaaccagagtcatctgccttggctttgacctcgtcgctgtccccgctccagccatcaactttggtctcgactcgatcgtcttcgttaccccagccggtgacttcctgctttccccaagcttggccgttcgtctcgtgctcttcgccactgtcatcgccaacgaagagagccgtgggtgaaaagacgaggcactctccgcgctgatgagttgtcaaacgggatcgaatcagcacgatgattactagttcacactggcacacgcaccgactcacgtctagcatgactaccctctcaaacgcatctctatccagctcggacgacacgtgcttggcgagatgcgtgaaccaaccagcgctgaagaatcggtggcagacgatgaaagagcagagatcgagtagactggaaggcaccaccgtcggctcctgcgtcgagatgatgaccctcatggccaagtgacgctgttgacgggtgaagctgaggagtctttcggtcagcctcttggaaccttcggagatggtgctaccctcgggagtcaggtactgtaaacgccaacaggaatggatcgacacaaaacgtgccatgaaccataatccgcaaaggaagcgtaccttgtgagcctcgtcaaggactacgactttactacacttgaattcggccttgttgtacaatttgagcacaatctcgaacaacgagcaagccgcagacgggctgataaagctgtgtcctcgatgggtcgagcctcgatgcgaggccgttcatggggatcgaacgcggactcacgggtcagtcaagtcgacgatagtcaattgaccctgcttgagcctcccaccaggaggttgcttgatcgcgataggttctgctggcccttttgcaccaggagcgagtttcggacgtttgatgggaaagagcttgcccctatccttgcgacagagaaatccttccagcagggacagcctctgatccagcatcctcgcttgaatcggttcgagcgtgagtgtactgagacccatcttgaagttggtgtacgagtagctctcccccaggtccgagatgacttgcatcaccatgtgcatgtagagtggcatctgacccgactctgatacggccatcaacgccaggagactcgtggcgtccaggtcctcttcttagaaatacagcgggtggactttggctcctcccccaaactgggcgtaagaagtcgccacgtgtctgtaattcgagggcgagcaaaagacgacgacgtcgggagggacgaccatgacctgttcgcattgacccacaaaggtcgcttcgcacggtttcagagaggtaccggattcgccaaaatgaaggaccaaggcggacagcgccgaaggtagagcgccgagacggttgtcctggatcaacatggactccaggaggaccgagaccgtgtggctctgcagtcatggcgtcgttcatcagctaggttcctctcaatcgactcggattaggatcgactgaccttgccggatccttgaactccgcagactatcgccgtcggccagtgagcttgttgatatcagtgtaagacctagggcggggacttgccgacagcagtgaaaggcgaattgatgttacagtagagtctcttgtcttccggtcggctgggaaatcctttggcgctgtttggacacgcagcgggagatcatcagccggggttcttcatgtcaaagcgacgtcgatgacgactcgactcactgggtacgaaggacttggccgaatacgccgtattggggcagagacccgtcttcggcctcgatagcagcatcatgactgatcaaaggagccgtgatggagtctgaatacgcacatctgatcaacgcgaccgtgtgtgcgtgcatgaaggagctgtccactcaccgacgacatcgacacgctcgtcgtcgtccgagtctgtaccgctctcgagatcctcgagcacactcagtccggcgttatcgatggtgattggtttcctctcgcgaattccctttttcttgccgttgaagcccggaaatctggaagctctcatcatgatgggccgaccgagtgatggggacaagacagcgagagagcggtcgtgtcgcttgcaaagggtagctacagctcgttattgcttcgcacagctagttgattaagcttggtatggtcttcaagatttttgaacacgtaggttgttgtttcaagaagcaatgagcaatgggtgatatctgtcggcggctcgggggatccaccggctttgcctttttgttctcgacttgcgaaccttttgttgtctccttctcgcttctcgaccgggtgtcgaatgcttcaatgacaataaccggcactgtcggccctgctcggcttggctcggcggtgacctcgaatgacagcaagctcgaagctattgttgttgcagagcgatcaagctctggggccagtgacaaactgggtaaggcggtcatgaacattacctacgtcaagggtaagcccttcctctccaaaaataagctttcgagcgattcgatggtttttgcttccgaggcgaactttgtttgggctatgtcgggtgagatagggtccagagggacgaaagaatatctgcggctctgcccctccctttcaacaactgaagaatcgacgctccgagtgaagcatgacgacagcctgggtgccattttttacaattgcagtcgccggtcacagctcgaaggcgcagggatacgtctgcgaccggcatacgctccgctcttcggtcgatgcctacgtggaacacattgcaggctcatcatgtggacgaggctgaagtcattgctattacaaaccagcccccagggaccgggccgtacggcgagggtaatgcggacgaatgacaacgctacacgttcgttgactcttacagtaaaaagcttgccgtgtagacatgagccttgcgagtgtgaaggcagctcccgcggagacggagatgtctccgatactgttcgtcatctcgactaatcctgcggaagccgaacgagatctgaatgaccatggaagctactgtatggagcgtttaagattagaagttagccatacgagatctcatggtttgaaacgccattgaggtgacgtatggttgaacctccacttcttccctgacgtcatggctccgacctccacttcccttattcgattgctaccgagaagcagctccccttcccctactgtaccacccggatgtcatcgtcgtcctcgtcaccaaacgccggtcatagagatcaactgtggacgaggaagtatatagatcaaaggttgtcagtggtactgtgcagactgtggagtaagcgaggctcatagcgatccatcatacccatacccgctacaattacaccaacccgcacaccatgtccaaccaactcgtcctcattaccggaatctccggcttcgtggccactcacgtcgccctcgagtttctcaagaacggacaccgagttcgaggtaccgttcgatcccaagaaaaggccgacttggtgaaaaagacccccgtcttcgagccttttgtggatcaattgagtttcgtcgtcgtagaggacctcgtcacgggagacttcaccgaggccggtcagtacctccggtagcccctacatctaggcgttccgggctaacggattagagttcacccttgtagtcaaggatgttaccatcgtcgcgcacaccgctagcccgttccacatgtcaggatcgtcttgggagaaggattacagggaccccgccgttcagggtaccaggaactgtctgggagccgccgccaagcaacccagtgcgtccaggtcgtcggctgacctaggactatctcattggctgatgtactggcgttgtgactttagccgtcaagcacgtcgttgtgacttcgtcctttgcgtgtaagtacacgttctagcgtagatgatacccctcacgacatggtagctcatgttaaatcgttgctacgctgcagccgttggtagctttagcaaacccgctacggaacaggtcggcaaggtgtacaccgaggaggactggaacccaatcaccgaaaaggaatgtgaggagatcaagagtgatgagtgagcatgcaaatccctcagtttcccctcgacacacagatctgaccgtcagccctgctcgttttcagcccgacggccgccaggatatggtactgcgcctcgaaaaagtttgccgaaaaggccgcttgggaaatcgccgaaaaggctcaattcaccttgagtaccatctgcccacccatggtctttggtcctcccttgcaccacgttgatagcttgaaggctttgaacacgagcagtggagcggtttacgggttgatgaaaaaggacggtagctcgagcaagcaagtgcccccgaccggtacccccgcagtgagtaccccctgacatcggcgtcggccacgcaaccggactgacggccgtgtatgctcgtccgaacgccatagtttgccgacgtccgtaacgtcgccgaagcccatttcaagagcgccatcgagggcaagaacgagaggtacctcgtctgtaacggaagtttcaacaaccagaccatcgtcgatgccatccgcaagtcttaccccgagctcaaggaacgcttggccgagggtaacccgggcgaaaccgccgagggcaaggtgttcaagttggacgctagcaaggccgagaaggagttgggtattcgatgtgagttcgacctcgtttgcaagatgtgtcgtcaaagtggatcgatcgctgatgacgcttgctcccctggtagacatctcgtttgaagactgtatcaaggacaccgtcgacaggttcctctccatcgagaaggatgtcaactagcgtgtgtgaatggagttgagaattgtatctacacaagtaagaatctatgatgatgtgatgtgatgtgatatgccgttggccggagtcgggtgaagtggaacaggtgtgttgcgatgaagctgtttcgcgccgggtttccagctcgattacagctactacaggcaatgccacagtggtaccgaaacgctagcccccgtaaccatttttgccaacgagcgtctgttcagcacatgagaggcgaacgctgtgcaatcgtttgttgccaagctatcctgtaagcgctccgtcgtcaacctcgcctaaacttgcggttgcttgtaatcagattcgaaaagggagattagcttccgacgcaggcaggcaggcaggctacgctacaaaagtcggtaacgaccatgatcgaagccgttcatgcttgacctctacccagcagtctccgagcggcagcccgttttacaaactcgcatcacactccgatggtcgcctctaccacccccacctaccgtatcgaccgactacaggccgacacttcccgggtgagagacgccgcatcgatccaactggccgctttcgatccgttcaccgagtaccaatccgtcatcgagcccgaaccccgtccttcgttcaaggtcagggtggacaagctcgaataccggatcaacagcaagttgagaggaggagaggagagcagtcatctgggatacgtcgcggtggatgaaacgacgggggagacggtagggatgtcttactggatgagaccggggaggaaacacaagttgccggatgtcaacaagatggacgacgagatggcgcaagcttggaaaggatgggagacggaaaagtatagcaagctgtacgccgcgttccagggcaagatgagcgaggtattggaggaacgtggtgaagagggttgttggtgagtgtcgtatcggttggggtgttgtgaagcacatgcaagctgatcgatcgacgggacgtgacaggtacttggaaatcctggccatccacccgacacgccaaggtaatcgactcggccccaagttgctggatcaccatctcgcccagatcgactcgtctatggtgcagaacgctcctgcctacctcgagtcttccccaccagcgaggaggttgtacaatagtcgagggtacgaggacgtcggtgatgtctcggcggaaggatgggacgatgcgttcccggccatgtaccggccaaagatgagcaaggtcgaggtgtagccagccagacatagcatattattaacgtacatgtggtggggcggggggagtctacacgagcggacatctcgctgtttccccccgggagctatatcggatgtccgtgtgttcacccttcttttgcttccgctcgaatcctgagtgacccacggggagcgagcgattaccccgacgtcattcctcgagttgcgagttgattcaactagactaccatctcgaacgactcgcaaaggctactcacttgctgtaaagactaccacacagcaacgatgaagtggtctaccactctcttgaccctgagtctactcggctcgttggtcgacgcgatccctgcaaagcaggagcacttccaagcggaaacgtctctcacgaagcacaagcacaagcacaagcatcatggaccacatgaaaagggtggaatcgcttgggacgagaacagtctgatcatcgatggagagagaatcgtcttgtggtcagtgtcacaggtcggggctgtaccgcttgtaatcccaaattgactcgccttgctctgcttctattaggagcggagagtttcatcgtgagccagcaacgacagccatttcggacaacgccgaagatgaatgtcaaacccgtgtttatagcctggagattacccgtcccatcgctctggctagatgttttacaaaagatcaaggctctcggtttcaacgctgtacgtccgagtcggcctcattctcgcgagtctagctgatgagaacggggttcatacgggaaagatctccttctactcgcattggggactcaacaacccggccaatgggaccctcgatttcgaagggttcagggattatcagccgttcctcgatgcctgtatgcaagcggggctatgggtcgtagccagacccggtccttatatcaacgccgaggtgagtcttgaccgcgtctcaccgagtagagcgacggtcaagctgatcccgaacgaccatcatccacggcgagctcagacgacgggaggcgggatcccaggttgggtactcgcttccgacgccaaagtcaggacgaacgacccccactttgaagccgcttggaaaccttattggcaggccataggagagctttgcgctaggaaccagtgggatgaaggtggaccggtgatcatggtccagatcgagaacggtaggtcaaggcaacgccgcgacgtcactcgggcgcactgacgaaccggtctctggctcaaatagagtactttttgaacgggaaaggcgatatggacctggagtatatcaaggcgctcgagaagagcatgatcgacgccggtgtgaaagtgcccctcagtttcaacgacgtgagtcttgacgcccattcctcctccccaccggctgataatgtggacacgcgacggcgatgacggcaggtcgggatgaagaatcggctcgtcaagggaccaggacatgtcgacctgtacggtttcgattcttacccgcagagcctcgattgggacgcctgtggagcgcaagaatggagaccggtcgatgagaggtatcacgattactttgcatcgaccgctgggaaggtcggcgtgccgtactacattgcaagtggttcgacgttcggcgtcaagccatgacacacgctgacatcacctcgatgaacagcccgagttccaaggcgggacgatcaatcaatggaccatgcctatcgttgaagactgtcaacgcctgtttggagccgagtttgagagggtcttttatttgcacaatctggcttctggcgtcaagatgcacaacgtctacatggtgtacggaggtaggctcgctgtgccatcagccttggatagagaaattgttgacgacgccgagttgacaggtactaattggggaggactggctttcccaccgagcacgacgacgtacgactactttgccgcgatccgagaggacaggacgttaagggaacccaagtatagcgaactcaaggttatttcacactttttgagatcggcgagagactacccggatgcccacgtcgtgggcaagtggaaagtcgaagggcaagggtcagagtccaaagagtcggtgctagtgaccgagttggaaaacaaggagactcgcggacggttctacatcgttcgacaagtcaagtgagtgcaccgtggtgctatttttgaaaacccggcttgaccttggccccagttcgagctcgttggacacgaccgagttcaagctacaggttcgggtcgggtctcacaagcacaagaccgtgactctgcccaagaacggccagctggcgttgaacggccgggacagccggatcatcgctaccgggttcaatttcggcaagagtcgcatggcttactgtacggcgaggatcatgctggctaccacgatcggtcaagaagatatagtgctcgtctatggagacgaaggcgagcaccacgagattgcctttgacgaggacgaatcgatggtcatgctcaagaacgacgccgtggacgactttgtgcttgacgaccgagtcatgtcgttccagacgcgaggtaggggtatccgatcgacccggatgaaacgcggcaagcgagacatgcgagttctcgtggcggataccgagactgcctatgcgacgtggcagcccgtgttgcgtgatgaggccagcgaggatcctcgcgaggccttttatcggcaccaggatggcgagaacgttgtcgtcgttgggccgtgagttcggggttggtctgactatctctggtggtttactgactttgccatgtgatcgcagctacttggtccgagatgccgttcgcaagggcaagacactgaacatcgccggcgacttgagcaactctgtctcgctactggtgtttgctccaccagacatcgaatccgtgctatggaacggccaagacgtcggggcaagaaagaacgattggagcgcttgggcggcagaactcgtagggcccgagacactggagcctatcgtcaccgacctggcttcttggcgatacgccgacagccttccagaagtgggagactttgacgactcggattgggtcgacgctgatcacacatcgactggtgagtcacgatgtcatctcctgcgggatgacacgctgaccaagagtccacctagacaacctccacaagccgtacaagaattacgagggcaagtctgtgctctacgcggaagactatgggtaccatcagggcaatctcctcttccgtggtcactttaacgccaccggtcgagagagccgtctagacttgtcgctgtcgcccggacggtacggagcaggctccgtctggctcaatggtcggctgttgggatccggtaacgtccctatcgacaagatccgatccgaggatgtcaacgtgacgttcgctctcgactctacgatgatacgcgccggtcaagacaacgtgatcttggttcttaccgatcacatggggtacgaagaggccggtcagtttactgatcataccgacgacgtgaagagtcctcgaggtgttcgcggctacagcttggtaggcggcggcgagattgcctggaagattcaaggaaacttgggaggaaactgggcgccgcaagaccaactccgatccatgctcaacgaaggaggattgtttgccgaggtcagtgtgaatcgctcgacccggacgatactttggctgatacgctttaaatccacagcgtcaaggttggcatctgtccgactttgattcgtcttcttggccagtacgcgacatattcgaaggcccaggctactctggtgtcggtttccaccggtcgacgttcaacctgagcgtccctgctggcattgacctgtcactcagcgtcgtctatcccaacgagatggggccattccgctctcaggtttgggtcaacggatggatgatgggcaagcgagtgggcagtctcggacctcagctcgaggtgagtcgaacggggtacaactgcaatgtccagtcgctaacgaacaacgcgtgcgctcgcctagttccccgttcctcccggtgtcttggtcaatggtaccaactcgattgccgtttcgtactggtccctcgaggtcatcaaggacacggcgccaaaggtacctcatggacccagggtggtcgtgtctcacgtgaccaaaaccggttatgacatggagcccgtatggcaacagtatgtttgagcagcccgagcaaaggaaaggcaagcgaatatggaatctatctatctgctgcatgtaacgtaaaaacgccgaaacaaatccaaaggtagcaatgtacactgtcactcgacctgcctcgctgcctagctgtccgcctgtttgaacgatcgaacccgtcagactgactctgtgatcagtacatgccagcggcagccctacagctcgtccatactagactcacctgtcattgcccctaggccttgtacgtggcggcctctcggtcgtcggcattgagcctaccccattcaagacaaagcctagcaattcacagtgcgaatcagctcctcatccccgacttgcacgcattcgagcctgtactcgcctgtagacgtaaacctccatgtcgaccttgcgaccgtgggtgtatttccagctcctaccggccttggcaatctttcgaagctcggcgtctccatccaaccgaccagcggcgagagctgccttgcgaccgccaaacgaggctcgggtctggttggccgcttgcgtcatggcttgggtgggaccggaaaagtaagaccagatgttgtagatctcgctgtatccctgggtgaccgggatgtaatggagcctagtcacatggttgatgttagctacaggtcggaaagggatccgaccgtacatgcactcaccaaggttcgatccagtctgttgacaaaaaaggatcacggttcagctcgtgcaaaccacacgctcgggacttcgcgacgactcgcctgagaagaactcggtatacacggtggccttcatgacagcgctctcactcgccaacagtgcaaagtaacgggctgagtaacccatcccatccagatcgatcaggtacttgtgcctccagttctcaccgagcgggacggcgtcggcgaatcgatgatccttgcgcatcccatcacaacccccggggtactgagtgcaaccgacggccttggtgaatgcggcgtccgagatgtcggcgttgagttgaccgatgggtactttggcttcgatgaaatggtccgagccgggtgggtcagcaaagacgacggatcggttggcgtcggacgagtccgaggtcaggcgtaggtatctacgcaaggggtcatgtcagcacgcgatgctagccaagtcatccgagctagccaagccggtgggcgggactcaccggtgtcgctggtactgggcgaggaaaccgggaggggaagaacctcctccggtcgtcgcgcctcgccagtaaatgtcgtcgaccttgttatgccagggaacctccatatcgtcgacctctttgatgaccatgtgcgcagggtcccaaccgtacgtgtatcgcttggtggacgaatagtagtagtgcgaggggatgaggatgtcaccgtacccggtccccttggccggagagaacatggggtacaacgcgtggatcgttcgccaatcggaaaaaaagtgaccctgactgtaatgcgcccaagggtgatcgcagtacgagtacttgtcgtcgatctgttcggcgaacgtgaaatcaggactgagcgaggtggagattccggcctgttcgaggtggtccacgggttgttggccgtccttgagacgggctcgcagggatccaaagagacgtcgagcttgagagtgggggtcgcaagtccgtcgataggcctcccagacgttgccatcgcctcgccaatcgggcgcaaacttgcctccaagaacgtgctcgatgccctctatcaaaggtcgggtccgtacaaggatacgagatcagcggcccaacacgtaagaacgaacggttgactctgccgactcactgctggcgtcggcggtcaagttgtggtacaagttctgctcccatggaacgaggatcctaccttcggccttttcgttgatggggaaatccatgtcgggcagtttgtcctggaatttctccaacatgaccctgaaccccttggcacgtgccccgacttcggcatcgtcaaaccccttgttgacgtcgatcgtccgggtcgtcccgttctgaacacggaccaagtcgaccgagggcaagtacccgacttggatggctcgttctctaatctctgcaccggcgaattgtcgaaagggagccaagtcacgcatcaactgatcgtactcgtcgatcatgtcgaccttgttgtccttggcgaattggaaccactcgtcgaatcccttgggcgggtccatgtcgtatcgtttgcggtactcgttgacggcttcttcgagcgtcttgctctgtccattgagcttgcgctcaaagttgtccttggcccgggccatgagcttggggatggggtgttggatggggggacgttggaccgccttgtccccacggttcctcatcagaccctgtcgaaaggacaacgggttggccgtccatttcggggtacggaaggatctgttggtcgagggtaggatctgtagcaagagtaggaaagaggccaacccgaggaccgagtagatgaccttgcgacggttcgggatggggtttgacccggaagacgaggtctttgaggtggtcgctcggtgaggcatcgtgtgggcgtgggcgatggcgagatctcaggggcaacggcgcctgttcgttggctagtcgatggggtggaacttgctcccgactaccagtgggaagcagtgatgggacggtggagcggtgtgcaagttgcaaagtagataggtagataggtatagatagggttgtggtttgcattttcctcccactttgcgctggacgcgacgtcgagaaggagggaaacaacttggaaaagtcttaaatccaggaaacaaggtcgtggcaacactcagttcactctacaacctataacgtccacaccaatctggaactggtataggatagccctgcatcgaattgatactcgggatggaccccgcagtcacgtcgacaccgcctagaaaggccatcgtcgggcgacacgactcacccgccagtctaggtcggggtgtagggtccagtccggcgtacctctcggtgagcaccgtggttggggggatgtgggctggcaagagcgcaggctgacgttggtgtacgctcgggtagagtatcaggaaacactccttgtatgggacagacgatagagtcgtcatcgagtgggtcacactgtcgtcccgtgtcgacctcgtaaagctgacccatgacgacgctcgaccagccctggatcccggatatggaagatcggattctctggtgaaagcaaaccgagaagagtcttttacccgagatactcgttcccggatgatcccattggcaagcgggacggggtgatatgggacgtggatgtcgtcaggatggccgatcagttggacagcttcagggtcgataatgggtggagcgaagagcaatcacaggacaaggaccaggggggggagcaagacaaggtcgagggagagacgatggaacgcagggaagaagtcttggagattatcaagtcgaggctgatcagggtcttcagggacgtctattacaagtcagtccatgcgtcgcacctggtcgacccgaaccaaaccgaggttgatagcatgtctacgccgggtagacacttgctgaccgagtcgaggtcgagaaaggtcatcatcgtcactcatccattcttgccagatcctatccgtcacctcgtagcccaagttttgctggagaacctgcaggtcagtccgggcgtgggcatgagcgtgggcgtcggcgtgtcgacgaactgactttgtcgagctcatcgtgtgcaggtccggtcagtcagcttcaccccggctcccttgttggcgttgatggccgtgggacggacgaccgggttggtcctcgacgtcggataccacgaatcgaccgtcgtaccggtgagttaccgagacggacactcgactgcgccgacggagatctcccgctgaactcgactcgaggatgtggtcatcgcgtcgcaggtgtttcaaggccgagtcttgagcgagtacatcatctcgacggggatatcaggcaaggccttcttgcgtcgactcgagttgctggtcgagcgcttcggtcgggtcccgaatgacacgccacacaagggcgaggcgagggtcacgctagaactggtcgaggagatcaggtcgagggcttgtttcgtacaccccgaagccgttgcccggtccacaacaccgggttcacaaggaatcgagggggacgatgaggggacaaacttggcagaagtgctgagacgcgcgtacgaggggaccaaccacccggataccaaaccgacctcgttcgagcgggacgggttgcgttggttgatacccgcatgggtcaaagaacggacggccgaggtctactttgaattgggagagggggacgacggtgtcagcttgcaagaggccgtcgcagggtgtctcgtcaaggtgagcgagcgttcaatgggtcggctgccagtgaaccacggtgttgatcctgtatcggatgccgcagcttccgatcgacctgaggcgcacgatggcgggtagcctgctggtcacgggtggaggtggggtcttaccggggttcacaaggagactaaggacgagtatgttgcacctgattcaagagtctcgctttgaacctgcagagccggcgcaacgtttaagcaaggagaggaacgtgggaagcagaccctttgcgtgtctcattgggttgacgcacgagctggcgatcttgaacgattcgagcgtcagcagcgggtcgtcggaaaagcaaggcgcgcagggttcggcaccggcttggaaccctgggttggtgagctggatcggaggtagcttggcagggtgagtcgcagggctcgttcggggcgttcacgctctaggcttaggctgatcggtgaggctttgcctgtgttgcagagcgctacaaatcggtggacaagagtatgaactagaggacgaacacgaagcatcgcaagaggccctgcgatgaggtcatgacattcacgatttgaagcccgacgcacgactaccatgatgttgatgatgatgacctattacgatagctagccttgttgtattacgactggtgactagcgaacccatgagcatataacccccttggttggcagcgatgttctgacgatatccgatcggttcaattgattggtggtttcccgtttttcgcgctaaggaattcgaaagataagatagattccgagcgatcgagcgaggttgaaccggctccggtcaaaactacaacgacatgtagacatgcaatcgagctgcgtgctattcaattcgaggctgatgtacccacagctgcgtatgtcagtgcacgagtgtgtgtgtggatgtcgtgattgtatggtcgattgttgctttctctttttttttttgaattgaattgactttaaatgaaatcggattttgtggcttgagcggaggaaattcaaaaatgggacacactcactcactttcatatccgttccgtccctcgaacgaataggatagatagcaacgaccctacacacacacgcagacaccaagtctagtctacaccgtactgcaacgactagccacctcgaacatcgacccgtcactcttgcctttccccgcagcttgaatgcgtacagctcgacggatctcgtcgaccatcatcaacaactttggaccccggtatcaggcaaacacgctcgtcgagtcacccttccgtcgttacacccagacagctagcaccccgtcttcagtcttgccttctgcatcaaagcaagcctacaacgagactcatcccaaagtcgacgaacgacgacagacgacaccactctcgaccatcatgcccgtcaacgcggtagatttccccgaactccaagcttgcttgacgagcaatgccgaatgggcagccaggacccatgcggatgaaccagggttctttgaaaggagtgccaagggtcaaaaaccgttcttgctctggatcggatgtgagtcccgagcggatggcggggtcacgtccgggccacgttcatgagctcatcaaaagtcgtcgtcgtcatcactacgccatgatctcgtcctcatcgccttgactcgcccgacatccccccctctcttttcgtacactctcggtatattaccccgaccccataggcgccgactctcgagtccccgaatccgtcgtcctaggcaggaaacccggcgagatctttgtccaccgaaacatcgccaaccagtatcaacagggagacgatagcgctcaggcggtattggagtatgccgtctcgttcttgggcgtcaggcatggtgagtcgagcgcagtctcactaccgaacagatgcggaaagagggggagagggtgactgatcgatgtgatgatcggcacggacgatagtcgccattgtcgggcacacggcatgtggaggatgtgcggccgcctatatgagcaagcccgaggatgccgggaacaaggaggtatgacgatgcctctcaattcaatcgataactgagcacaacgctgaccccccgtacaccgatttgcttagaccaagacgtcgttggcgaggttcttacaacccctgatcgatctccgacactcgttacccgagggagcctcgatggacgacctcatcgtcgaaaacgtcaaacgaggcgtcgtcgatgtggccaagagcgaggtcatccagaagcaatgggccaaagccgccaacgaggaagggttggagccggtctacgtacacgggtggttgaaggacttgtccaccgggttgatcaaggatctccaatgttcccagggccccgacaaggcgtagagtgtagggtaggaggttgaagaggacaggagtggggtgattgtatgacatgggttttgtggatatggtatagcagcgaacggcgagagagagagcgagccgcgggagtacattcaataatttacggtttacgacgaaacgacaatgagctactactgcttgttggcgcagttgctgcatttgcaagacttgcacgaacaactgccaggggtcgagcacgaggtgcagttgtcgccgcagctacgggtcgatcgtggtcaaacggctgaattggcttcagagacggtcggggcggtaccctggaactcacgtgcatgcacctccactgctagcctggttcttgggaggacatccggcacacttgcaagagtcgcaagaacaagcttgggcgttggatccgccgcagttgttacagttggtatcgcagctggcggtgtcgacacgagagacgtcagggtcggggtcggcagaacggcaagtcgtcgtcgtgactcacttgcaagccatcgtggaaattatcagagtcggttgtctcggaaagttggcggcggtggatcgtttcggatgcgagattcgtttgaaatgaggatcctagagtgatggggtcatcgtgtacttcacggtctcccccccaaggagtacagagtatatatacttgttgctcccgagttggctgacgtgggctcatctcgtgatcactcctcgtccatgataagctcccgaacgaggtcgactcgatgtcacgtggcatatgggcaatgacaacattcggaacaagaacccagagcaaacgaggcaactcccaagctgcgagctgcaagctggacatgggcatgtgaacattatgataaggaagaaacaaggagaacgcaacgacctcgccgccgactaggcgctctcgtgacccttgttcccacaacacatggcaaagaaaccgcccttcttcttgggtgcggccggctgagtcgatgccacaggagcccttccaacgggtgccgcagcgacgacaggcgcaggagtggtagcgaccggtgcgatgggttccggctgctcgaccacggcaggagtctcgatggtagtcttgggctcgacgggcgctgtagcggcggcgaccttggtgggcatctcccggtgagcctcgacgacgttgctactcctgttcaacgactcggccaactcgctcgactctttcgaggcgtatccggattccttgggcgcggccacctcgccacactctttgcatcgacggctttcgtcgttggtcatccagtcgttgatgagcggtttcaactgggtgcccaagtcggtgcatcggaacgagtctttgcggatcaccgtcaggtccttgtgaaccgggttggggcagtaccattggagcgaatctgacgtcgagggtcccggggtcgttcgtcagcggcgagtcccagggaaagtcgtcgtattcgcactcaccgatcgctccctccggtcgaacctgttccaagacgatcccgatcgtatcggcaaacctgcaagggttatgaggcgtgttcccgggcaagaggaacatctccccttccccaatgataatgtcacgacgacgtccattttcgacaatcttgagcaccatcggacccttgtgttggtagaaccattcttcggtctcgttgacgtggaagtcggcccgagagttgggtccacccacgatcatgacggtaaagttggatccactgtagatgcagtggttgcctgggggacgggcatgaaggttcgggttagctctgccattcgatcaaacgctcgacgacgacaacggggcacttaccaacgggaggtttgagcaagtgggtgttttccttcaaccaacgaggaaagttgataggttcagggatcgtcttggcgagcgaatcggcgtggatctggtctcgttcatccttgagcgagtatcccgagtcctgctgctgggtggatcggttggcagccacggcagtggcagcggcagccccggtagcagcaacagccgagcccgcgacgatgggtgcaccgagggacaagttggatagctcgtgcgaaggagcttctacaccagactcggtgtggctgctactagcaacggctcgttcggacggctgggacgcggctcgagcagcagcggcggctctatcgtaggcgaatagacccgagtcagtcttcatgtaccactacgtcattcgttgttctttgctcggcatgggggtctaggtacagcatgaacagggtagtctcgtgtctttccaccgtccccccttggcgtttctctgacccctcctcgactctgtacgtcgactacccctcggtttccatgcgtaccatctaccccctcgtgcgtgtgtacactcacgccaattccttgcctcgaacaaaggttccaacgtgcttgccgaattcctcgccctaaggcgtcgacgtcgttcgcggcgttagcccgagtggtgtgagaaaacgtacaaggaacgagtgccacgggcttacctggtaagtggcgatgctcaactcggtctcgctaggctgcctggatccgtcaccgttggcgatggtagcggcaccccagggagcacctccctcgaccctgtcaatgacggacaatccggcgttggcgtatccactgtgaggccggcgtgggttagtccggggggttcaacgtggggggcatggggcgacgacgtacagagggacaaaggagattccgtggtggacaaagaagggaaccgtggtcaaggcggtagtctcctgtccaccgtgctgtccagcagtcgagctgagggcaggcatcgactcgtcaatccgaggtgaccatgcgagtttgtacaacgcctgcacggaactcacgtaaagacaccggcaaacttgccgatcaaggcgccgctagcccagagtccaccggtctggtcgaaaaaggccgagacttgggcgggggcacgtccgtatcgggtagggaaaccgaaaaggaacccgtcactgtcgtcccgagcgggtgagcgaggtcagtgaggccgggggtgctgttgttgcgacgcgagactcacagctctttaaggtcgttgggagtgatgatggggtacttgggcttcaacgagccgccggcgtacatcttgccgaggatctcttcgctcagagtttccttgctagcgacggtgtgaggttaggccaggatcagcgagtgtcaaagggagggacgtgtgataaggcttacatttggaacatcttgacctcggctcccgatttctcgagaccggcctagagggtcgaacagcacatgcagacagatgtacgtgagggagagtgcagcagcaaccaagacgatgtactgacctgaacagcctcggcgagttgaccgacgtgaccatagctgcgaacgaggagtggcatgcacgtgtcagtcgggggtgatcgagacgggttgattcgcttagggcgacagctcacgtcgagtagtaaatgacaccgatcttggcaggcatgttgaatgagagtgtaagagtatgagcttgtatgtgggtgggttgtagtagagtagcagctagcagtgtgtgtgagtgtgttgtggatggggggttgtatatatatacagtagttgtgttagacctggggacgaagggtgactcacgctgaaatttgcttccgcgacattggattactcaaacaatcccacgctaagtcagtgcaagggtgtggcatggcaatggggtttatctgtcattcagcacagacacacacggtagctaccgagtgactagttggtcatggtcaccacggtagctgtcatggctacgaatgatgaatgcatatgatgtatgatgttgatgtatatggtagaaggcgtgaaacaatctacgtctcgtcatcagccgtgacaaattcacagaaccgggccacggcccccgacaatctaccctcgtctctcaatctcttgtaataacgctcccatcctcgcacccagccgaggttgaccaccgcgtcgacccccgatcgatccacgtcgagcttgttgctgttgctgttgttgctgtctctgcaacgttcgattcgttcgacccggatggacaggagtatcgctaccgctcgtcttggctgggccgaggtaagccgtacgtttgaggtctcgcaaggacgattccgctgcattggccgtcgtcgttgtggtccccgtggccggttcaggtcgttgtaccttgtgggtatgtagcggtttccctcggaacggcgtgttatccaccgtgatcaccggcttcagcgccgtcgtcgtcgtcgactcagcctctcgacgcttgccgaccgacccgcccccctcgtccccacccaaaaaggtgaaattgggattcccaggatcctttttcccctttggacgtgtcaccgtggacatgctagccgacccgttcgtaccccaaggtcgagcttgtccacctccgtacaccggagtggatgacgatgcacctcctcgaccccggccccgcgacgcgcccctgcctcgtgtcgaattgtatggcaagcgggcggcatcgtcgtcttcgtccaaaccgggaggaggtccagctcgggatctctcccgggaccgtgatcccccctgcatctcatcgtcgtccgcgtcgtcgtcgtcgtcactagcccgtcctttgcccttgttcctaccaaaggagactctcgaatcgatcatgtcggcgtcgtcggcgtcgtcgaagaacccgtcatcgggatcagagtcgacggcggcgtcggcgtcgacatcggcaccgtgcttgctgactttcgggagacgttcttccccagactctaattcggattcatcactctcgctctcggggggtgcggtcttggtcgccgtcgaggtgggcttgcgagcttgttgtacgagtcgatcgatagggtcttggttggtgacccccagtcgacctccagtcccgggtcgaccaccgattcctctccctcgccccgacgtcgctccaccacgccctcgtccacctcgaacggaaacgccgccacctagacgttcgctctgtaatccctcccgcttcaacgccttggcgaacgatttcttaatcttggcccgttcgatgagggattccttgagttttttggctgcaagagtcgaggcatggcacgatgaggtcagccgaggtcacgcaggaagacaaacgaggtggtcgtctacgactcacctttacccaagtaggctgaatggggtgcatgagcggggactaccttgaacccggtgttgctcggtcgcgatgggtttttgccacggaacgacatggtccagtgttgcgacggcggtctttcctgctggctgtagctgggttctggctggctagacggttcgctgcgagttgcaaagagttgtaacgattcgattcgataccttgttgtataccttgcttgcttgcttgctttgtgtgtgtgtttcgtattttcactttcaatttctcacgcgaccacgagctcggagagtcaggaaaaggggaacaggcagggtcgagatcaggttcggggtactatatcaaccactgtattcctcttcattaacccccaggtacatctcccggtagtctagtcatccatcctctacacccccgtacgaaccaacctcatcgtaggcccccatatctcgattgaatgtcagctgaaggcgagtcgaaaacgcgtcaccgggagccttccgtgtcagcctggacatgtagctgatcaacaacccgtcactcgttcgtcgtcactctgctcgactctggtctgcattgcatgtcgctctgtggctctctcgtcgacttgctcgaattacctgtgctggaatgccgcccctgaacccggcctcgatcgccttgccatcgccacggttcgacctcgctcgatgtctttctgctcttcttcctcggacactctgccatcgcttcatccttgcaccaccgcagcctcgaacaaagtggacgctcaaaccgctcccaagaagaagctcgcccccgctgggggcatgctcaacctccaaagtcgaggtaggttcgcctgaactctggaccgcacacgaccacgtggttgcttacgaacacgcccaacgctgccctcgactctctctaccctgtgtcgacatactctccacgcccagatccctttgcggatgccgatttcggatcttccccctcggccgcggcgggtgccaaggcgaatgccagtcgaacgagcactcccaaggtcgatgacgatctcggtggggtcgccggtggcaagattcatatccgtaagcacgggccgcaggtcgctttcgtgcaccgaagttgaccggcaacacgctcgtacaactcggggataggtattcaacagcgtaacggaagaaagacgttgaccacggtgcaaggtctggacaaggcttacgacccgaaaaagatcctcaaggcgttcaaaaaggcgagtcccgggccgtccacaggagtctcgctcgccccgactaacatgaatcgcctcgcctcgccctgcctcgctcgacccgggcccgcaggaattcgcatgcaacggcaacgttgtctcgagcgaagaagccgaactcggtgcggatgccccggaacccgtcgtccccgctggcaagaccaagcccaactttggacaagtcatccagttgcaaggcgatcagaggaacgccgtcagggatttcttggtcagtaccgggatcgtcgccgagagggaggccaaggagaagattcaaatgtgggtcagggtcgaggtcgggcgcggtttcgtcttgcgtttgctgatggtcctctgggtgttctcttgttcgcagccacggacactagatccgagcgagatcccgagttgcttgcgcatcttcttcttcttctgtggcagtgtcgtttgtcgttatgcccatgtgtttatcgctatcgatcccatgtcatccgtgtcgggtcgtgttccggtttcttggctctagctggctcgatcgcgattcgtcacccgctcgaccctcgagggcgagtagaattcaaacttgatgtcatcagatactatactctcactacctttgttgatactcggtactccaacactctacctgcatcacactcacactcatctagtccccggaaatcatgtctgaatcgtaagcccctcaatgtcccaccatccaagtcagacgatgacgacgaaacgaccgacacgtcacgctcgccgcagtaaacaaacccaggaatacacctttgaaccgactcacccgttcaacttggaggatcccaagtcttgggccgagggagtcggtgagtgatatctagttgttgaatctggcctagcccgtaagctcacggcgactcgttgatgaccggatggcaggggcgatggattgggacaagacgcatatctgcttcacaaagaggagtttgttggagtttctcaagtcggtgtcaggccaaggcggggatgaacatagcgtagcaagctcatgtctttgtgtgctataggcaagccggtgtctcggtcgggaccaactacaaggaactccaaaagttgcccagtaagcggcgagcccaggcggtcaatcccccatcaaatcgctgacccgatgtgtatcctgtgaccccggccagaacacgctacgtttggcaaattctctagcgaagctacggatgctgccgtcaaggacttggtcgagggtaggtcccgctaacacctcggtcgagcgaggcggtcgctaaccatatcccccgactcgacaccccgccgcagccgaggtcgctgaccctcattccgaggaccaggaacaagccgtcttccgacccagtcgcaaggtcactcaatccccaggcggaaagtctagcatcaactttgttcagggggaatacgaagagcaagacgcgttgagcttggccccgcctaaacccaaggccgacggtcaaaagggtgatgacgacgacgaggccgccgccccggtcttgacgcataccgagagggtcaccttgagcaacttgtctatcggtggtaatgagggagaagagtgagtcggggcaaggggggcatgttgtttttctctcgtgtgagctgattcaatcgtgggtccgtagcaacggctcgggcgagactttcaggcccactcgcaaggtcagggagagtgagtttgagcgggtcaagggtgaacttttgctgctgctgatgtcgttcgtattgggcagaccccggtggaaactctactctgcgtggaaacttgttttccggttacgagtagcgggcgtcaacatcatgccgctctttacaaacgacccccacgatgcattacatatcgccgctactctggctgttccaacttggctcgctttctcgcctcgaatcgttccctcgccgctcgtcgtttggcatccccttcgccgtcatccccaccggctcgtcgtttcttggcagactcttccgcttcttgttgcttggccaggcgttcccgttcgacccgttccttttcgtccttcatctgatcggccaaacggcgtcgttccctcgccatcctagcctcgtacgatgcatcggtaccgacggctcgagactttgttggcaacgagacttcgagtcgtttaatgtcacccgacccgtccttgttcatggcgacgggcttcttggtaatgttcaagccggccttgagcaacacccgcttgtccacaatggcaccctcgtcattgatctcgagccgttcctgttccgtcgaagcggtggcaggcaagcgttcgacgacgggaaccgaagcggaagccgccgtcatcatggctcgttccatctccatccgttggcgttcccgtcgaataaaggggtcttcctcggccgtgtcatcgaacgtggtcgtcactgacgtcgagtcggctgcagtgggcggtctgatggccaacgaggcggcgggtcgactcgtcgaagcggctactgcagcggcatgcttttcctcgtcggcatccagcatgttgcgatagaacgccgtcatcccgggtcccttttgagaggcccgctccttggctaacggcgtcggcgtcagggtcagctcgaaaagacaccaacgtccgagcacacgacagactcaccttcccgagccttttcctcttgctcggccaacttgacctcttccatctgacgcttgtacgccgtcgtcacaaacttttccttgtgggcaaactcttccccttcctcgtcccgttcatgttgaagcatcttttcctcggctcgtagtcggtccagcttgcgtgtggctgccgattgcaagaaagattcgatgtatttcggctagaggccaagggcgaggcgacgggttcgggttagcattcgactggggattcttactctgacccggctcaccttgcgctcagcagattcttgctccttggcctgcttggcctgttgtcgagcactctgcatgccatcccacacctcgtcatactcgaacacggtttggtccaccttgaccgcctcttcctgtaattttttcgcctgtcgtccgagactggcattctgtttgatcagagcgttgttccggggtgtgactttggacggcccagccagtgtgggcatcgaagagggtcctccttggtcatcctcgtcgtcatcaccgaatgaaaacgaattcgaggcgggtttcggtttgggtttgagcgagatgccggatccgagtgggttgagcggggtgcccaagggcttggcaggtggttttcccagtgagaaggagagtttaggtgggtcaggcatggttgggtcaggttcagattgtcagcaggagtcctgaggtttggggaagcaagggtagtgggttgtcaagttctgttcgcctgttccgattcgaatatgctcaaggaatcgacgcgtagaaagcgagcaggagacgggttggaacaggcggacacgcatggccagacgcaaagacgagtttgcaacgatgacaagtacgacgctgggagtcggcaagaatcgctgtcggtgtctcgactcggagggctcgtcgtgtagatgccgatgctgcggtgatgttcattattacattctgatatgttacagactccgactccccgtcgatgacctcgatgccccggcccatcgctacagccgccgccctcgttaccacctcatggcaccacctcgagtcccatactcctcgcactccctgcgacactcctcgccactcgctccaatcccaacaccttgagatcctcgtcacccatcttgaccttggcgatctcgtacacctgcttgaccgagaccttgcctatgaagccaccaccgggtacgctcgtcgctccacccttggccgcgatggatgccggggcagaacctcccgctgtcgaacctgaactggcggctcgcaaggttcgggaggtatgcgagggaggcgcagcggatcccttgtcgatcgaggctgccgtgcggagcaaatgagcgacgggtggggttcgaaaggagaatgtgaatgttcggtccgggctgataatgatgctagtcggtacagggaccgtgggtttcaagtgagccgtccgggcgttgctaaaagggggaccaggggttcagctcgtgtacgatacggtttcgagcgggcgtgccggcgagacttgcaattctttacagaaatccatggccttgacacctcgtgctccgagtgccggacccacaggcggtgatggagtagccttgcccgccggtacaaggattttctgtagccaaggggacagcatgtcaagttggcgtgtgttagcttgtgcaacgtgcaaatcaaacaatccgggcgtgacccactcaccacgacttgtgtcactgctactttcgacatgttaccgagtggtctgttggttaggcgatacgagtgtgagatatcggttgttgcgaaagtcgcatcttgttgaaccaagatcaaggtcggttccgggggtcgttagagcgagagcaagttgactgagcggacatcgaggaagtgtttgttatgtccgcgtcgtggacatgcatcggtttcgtgcttgaaacagtgttgctttcaacagacatatacgattgacactcgggttggcgcattgcaaagagacacaaagcgacgagatgcagctcactagattggcgctatggtcatgccgtaggcatcgggtgcctcccggagaagccaaagcacaggcgcattgcgggttgcaatcttgcgacaacaagagacgctcacaacgattttctactatcgtgtgccttgcccagccccggacttcgagtatagcgccttgatcgtcggtcagtgtgtcataccaggcatcattatccagctcggaattggcgttgaatgaaatcaaccgccagactcgtagtcacgatgatttaaagataaacttggacattcacacactgaaatcgaaagagagtcgagtcgtcaagcgatgttatgagcgtatgagtttgctagtcaagttccatcgatgcattggctacgggtacaccgctcgtctcaaggttggctcctatttcgaaagctactttgcgtgttgaaggggaatgattcgacgtatgatgccattcttggccggttttgcccctgggttgctttagatgggatatcgtgcgttccaagtagacttatgagcggcaagctagccatacgtgcatgagatccttcgctagtggcagtagccgatgcagtgctgcgagtctcttgttcagttttatagaagcaatcagactcattgaccgcttcgcacggcgagccgaagcaatgagccgcgtctcgacctggggcagagaactagtgacatactgattgccatagtgctatgctcatataacatcaatcaatgatcgatgcaagcgacagtggccggcagagagtgatgcgtagcgaatagggagcatcatcgggactaggcgcgctttctccccaacgctatcgagcgaaatcaaccgttcccaaagctatcaccctccaaggcatgattgcgagtggaagcagagcatgctgtgagcccttcattcatagtcggacgggccgcattctgtagcgcaacacgccttcaaacaaccttgcgcgatttgattcgcccatagtagaaaatcgggaatcgcgacgtgtcacaaaaaatcgattatattcgctgttccagattatgcatgatgatctattacactcgagaaagcccatgctatcgtcatgcaaggcatagcgttgcccgctccagggattttcgcgttttcgtgtttttctcctagcgacgagtgggatatctccccctgaccctcgtacgcgcttcagcgaatccgacggaacgctacagtgcatacggtagacccagtcttgcctccgaatgagaacgagggatgtttgaccgtggaactgcgggtcgcgaattcgagagtcaatttcggtgcatggggtggatcgcgcgttctcgtcgaactcactgatattcaaagcctttgcacggcaggcagcgagtggttcagtctatagcactctctggacactctgcatcgacactgacctagctctgccttgccaaatctcgccttgacctcatcctcggtaaagttgcacgctgtgttgatcgagaatctcagctacgcccggctcgattcattcattgcgacacccacacgtgatcaggaagaaccctccgaccttgacgagctcgacgactcgttcaggatagaccaggctcgggagtttacccttgctcgggccagagtcgacgggttcttgactaagagcgatggcgtcgtaagtgcccttgtctaagaccaagtcccagccgttcaatggcacgctggccgattgttgatgcaggtcgtcgaatgtcgaagtcaacaggtccgaggcgaaccaggtgacggctggggagtcgttcacggtgtcctcgtcgtcgtcgttgtcgtcgtcatcgacatcgtcgtcactctcgctgtcggacccgcccagctcttctccagcttcctggcgccgctgatcgcttcgtattcgcctttcccagcgtctacgtcggagtccctcgactttggaagacaactcgatgcttagatccgagtagtcgatgccggtaaagtggcggggagagtgtcgggggagggtccggcggtactttggtttcgaggggtacaagatggaaagtagcagcgtgccattacctgcgggattcgaacatcagcctggattcgagagaagaatcctgggcaacgactcaccacatccgcattccatcacagtcgggccagagtcgtcgacaaagggaggaaggtgttcaaatgcccaatctaccatcttgtcaacggcgccttctccaaaccagatttcgccctcgtcgccggtttcctatacgcacagaggtagccaagagttacgagagtcagctctgagcgtgaagactgccgaggcgatgctcgttcatgcgtagcaacagcgaaccgatcgactcgcctcgtactctttggtctcacgttcatagaccatatcccagtgttccttggtgcccagcttggaggacggtagttcttccgacattgtgaagatttggctatcgactcgaggtatctgtgtggctggtagggttgtctttgtctcgccatactcggttgaatacgttcgataggtacatcccaaggtgtaatcaggttggctgctcagggttcactcccctgtctttggctgtcgatcacgtgactcgacaccaagcagcgatttctctagactttgcccgagggctatagccataggtaactatacaatcttgctatgccattcaagtcttgtacgagccacacccttgccctcactcagccaccaatcaaacctaccataaaatctgtcaaaatgcccgtcgaaggattcgcaggagatggccagttcgtcccaatgttgctcgaccccccgcgtgttcgcaggctgaacccttcgttgtgcttgcgaaccccgtagctacaggcagacctacaatgacatccacatcctatgtcaagagactgccaagcggatcaaggccgagttcagtgggtcgccccggggctgctggagtcgctgaatcgcaagagctaacgccggcactttgtagaccccgacatgatgatcgctatcggtggaggtggattcatccctgcccgtatcattcgaacgttcttgaaggtctcggactcgcccaacagccagccccgtaacatccctattcaggccatcgggttgtctctctacgaagccctgccggacacgtcggaagaggtcattggcaaggaagtcatccgaacgcaatggctcgactttagcacgctcggtgacaagaacctcaagtacggcgggttgctaggcaagcggatcttggtggtggacgaggtggacgataggtcggttcaaatgcgggtcaatccgtggttatcatagaagctgatgagcggccgggccatgtcgggatgctcgcagccgagctaccttgtcgtacgctctgcaagaactccagatcgacgtggagaagcagttgcaggagctcaaggtcagcgaggaagagcgcagccggatcagggaggctaccaagtttggaatatttgtcgttcacaacaagcaagtcgcccgcgcccggtcgctcgctcgcctttagtcgggattgctgatgttgacgccctgtccgtgcacagactgaagcccaaggccggagagattagcaaggacgtcgcctactttagcgggaccgatatcgaggatctttgggtcgattacccttggtgagtcggcctgggcgctcgggtcgggtcgctcttgctcacgtcgctgctgcttgggtctgcacagggagatgcccgacatcttgaagcacgacgagttgaagaggcaggacgatcagatggctgccagcaaggcctagtcggcgcagcacggagacgcagggactgccacggattgtaattcgggacagagtatagatttgcacttttctgggagtcggcttgtgcgtagccgtggttgtgggcgagccagagtgatggccgcagagacagcgtggattgttagtccccgcttgtgcttagcgttgtcacgatcgatcgcctgcgtggcaactttaccgcgttggacactggcagtcgaactttcacaacgtggcgggctgtgtgtcagccttctcactcccttgcagaaaagagctggtagcatcggtgaacacgtgcaagaatcactcagagccgcgttagaatgcaacatgattgatagtcgttcggcaagcactgtcgagtcgcgctgcataggttcgtaaatcgtaaagccgtcgtatatagtgtggtctgtcgtggatgtcgtgtatatcgtcgtcaccgttgccttctctctcgaacccctaatctcgcttcgagcctccaagtccgaatcccatctcgtctgcatcgacgactaatcagtcaggacctcaacgagccacacgcaaaccgagactcactccacgccgccgtgactcggggatccgggctcattgccctgcgaggtagcgcaaccatggtcagcgcggcggctcccgggccaggacgagaccctgacaactcgccttcgtatcgcctcgaccaatttctcctcgtccagctcgccgaatgcgacgaacggctttaaatccccgccgtcgactaccttgggcaaccaacgggaagatttgtagatggcatccagcctggcatcctttccattcccggcgtattcaactcgtacctgctagccctcgtggtccgtggtatggaaatccaacgcgagcgccggaccctcggtatgaacgtcgacttgttggacatcctggattcgcaataccctgtcccccaagcgaatctctcgagacgtcaaaacgagccatccagcgttgtgtcgcttcggctgttcccggtcccgctcgcttcgccttacagaaaaggttgcagcgcgcacgcaagttcctcttgctcgtcgacgtcttcggaccgttcgtgctgaatgtcgttcccgaggtctcggtcagccgactcgatatggtcaagctggacgatttgctcaagctcgatggcaatggatcgcaccagcaggtggcatcgacagtgcggaagctggagcgagccgaagccatgcaggtaagatggcgaacgctcgtactggaccttctcgtcgagcgatgccggctaagctcacggttcgtgatgtaggccaccaagaagaaggatagcgtcttctagtcgtttctggtgactggtcgttctgtcttgatggcaggattatatttagccggactccttctctgccgtgatgtatgcttgtcatgattcgatccgactcgtcgatctcgaaccgattgcctcgcgtctttgtgcgattcatctgatgtatgatacgcatgtctgctggaattatgtgcctcactaagtaccgtctcgatcttgacgtttgagcacccgagcaagttagatctcgcgccgatcggtaagaaacgtttgccgtagatgagcgaaaagacagccagtctttaggagaaccttatctgcttctcacgatcgaggcattcaccaggaatgtattgtgtgtatgattatcaccagtgcctacctatcccgaatactctgcaagttagcctgacaggcgcttggccacgactggcagatagcgaaacgcctcgttgcgcttatctgctaaatccgaatataattgctctcgtccatcgcatcaagagcgtctcgccgcggagccgcggcattgaatcccaaaggacccctagcgacaccttatcaaaaaggttgtcgtctaccgggatcggtcgatctgccgtcgatctcgagagacttgcgctgtgtattgtaattgcaagattgacccatcgtgcatcaaaccgcgatccgtgcatagcagcgaactgaagccattatgcatatcgccaagggtatatcttaatttacaaagcctggtctgttcgggtgtacgtggcagcatcgagattatgcctggatcatttacaggagcgtcaaccgggacggcggcagcgggagaccataggtcaattagacgcggttgattcccaggcagttggaaatctggagctcttccatggatagtatatgcaggacgcttccttcaaataggagaatggaaaggacagcgagaaggaaaaccgtctcctgagtggacctgggcagtgatctaccttagtgatcactgcgtatgattcgtaggcttggcatattctgatgtctgttccatcattttagctatgttttggttgttcatgactcacaccggttgctgagcgtttgcgccacgggcgtgccgcacgtgctgcttctcccctaagtcattgaagcgtcgcacgaggacgcgcactttcgccgatcatatcacctgatgcctcaacagtctgggtacctacggtgcagctcgtactaagccttgcttatatcatcaggtccgcctatataggagcgctggacataatcggcctacgctagggacggggcggcaagggtctgctgctacaggcgcaattgcagtggattcatgtgatcagtatttggctacgtcgttcctcttctgctttgtgaggtgaattcgtaacgggacttcccgatgataagagacattatgactgaggaccgccatttcagcctgcaagaccatcctgcggcattcctcttccgttccgtacttcccctcaaatgctgaaggatgtctgcatacgtggttcacgacttcacgaccgaatccaacactgtcgccatggtgcgtcgtaggaggtagctgttgcgtgtcaacaagtctcaccgagttctcgaacctgtcaatcaagcctctggctcaaccaagtggtcaaggtgtcaacgaggaatgaggctatgagcgggcggttggcgccactgagctttgttccggttggaatgattacaaaaatccacccagtcgtccatccacccgccatccaggtttcgacgaggaagaggacgccatgaatgggagacgcatcgaaggaggcgcgcaagaggaatacgaacggtttggcctgcttcatcgtgcctgagcttggcaagcgtgggtgggaatggggtggagaggcatcgatgacgggctgcaggctccacttttatcgaggtgtagtcgaggactagctcatcgacgtaacgtttacctggtatttggtattatccctgcctcagtctgttcgacgaggatgacaagttcttgttgaccggtctcggctatgccgctcatcatccggccctgggccagtctctacaaagaacgacacctgtacgtttgcttatcgcgctaatcagacaatcgtatccccgacaactaacacgctcttgacacctctgagctttgtgaactgagcagtacccgagttgggctgtaatgagagacccaaatagcgcaaaatacgtacaggaaccgaagaaattgatgctaagcgcaaacaatcgctttttctcgactcagacacgatcctgggccacccttagtacatgacctgtcttttgtgtcttcatcgtctttacagcgcccaatatctgtcggaaacaacaggaaatatgcctcggcctgaggtacggcccttcgttcacatctatttggtagacattgacttgaagtgttgcaatctcaggtagggttgtaaccgactcctacatcgagctgtatacacggctggcattgtttgtgctggaatgatcagtcgttgatcgatttgaccttggctatgctgatctcgctttccgactgtgccaatagatcgcttcccatgaagtatctgccggaagaagcgatcctcgaccgaatgaacacgcttccgacggcgtattcgctcgatttccggactgccatggccttccttctggtaccagttgtgaacaggccaacattagatgctgccataagcacagcatcttgacccaaggtcctgccttgcatattgctttgaccggtaatcagcccacgaagagaccgcctgcaggccatctacttgctagtacagcggaccgtcttgcttagacacaagagaaggctaacaaaatcagtcatgccaactaattcgatagagagaaagtcctccttttgctcttgccgatcctccatctggagtttaggaaataaccatttgcatagaatgtcattgaattatttcgacaggcgtcggaagctgatcgaatgcgggtaacgggaggccgcccgaattcaagctgggcgcattttatccctagatgctgatcaaaatccgtgtttgccaccgcgcgttgcgagcataaaataggaaggatgctggtcacaaatgagcttcatgccataacgagcgagcgtaaagaatgtgacgatatacagaaataccgatatccagaaatagaatgacaatcgattggaatgattcacgcgtggggatttcgcctcatccattatcaactaccagtcatcattatgacgtggccaaatttgagggagcaaatgcgttcgtactggggctcaactcgagctcgatcgacatcgctgatcagcgttgcacaggcagcacttcatttacccttgtattgctactgtagctcacacctcctcatcctctaacaatataggccgtcatggttcaagctacttccgcccggcatctcagcatctccgttgcgtaccctcataaggctcctgatatcgcactctttatggattacccccgtatcatagatgtcgacgtattggccgatatcactatcgcctgggcccgtgcgaacctacgtgaaggagagagggttttcaattacatcgggatgttggcaaacatggctagaggagacacctgtcttttcctcaagtggatgctcgatctgctcgcagaagccgaggtggatacagatatctgtcatgtagatatcagtcacgagctggaagacaactcgtggtatcgatggttgagtagtctcagccagggctcctttgggagcgatgactgataccccgtgcacttcgagccatgcaatgcagtattgagggaggaaggcggtgagatgagcctcaaaggtcatggcaagggatccggtaagtaggctgcagaatgcctctgtctacgggcttcgggctaccaccgttactgaccatcaaatacttcccgcggtaaccactaggctacagtctattggtggcggtctagatctgtcgcctggtacaaacgcttgagcggacccgattagttgtggggccggtcgacatacgggagacatatgagtgttgtaacgatacttacttatagagcccaaacgctacgcataacttttataccttagcgagaaggaaaccgctcgatcgccctcagtgtaattcttccttttaatatatgtcgtcatcggttcgccgagatgtgtctcttcaagctatttatggaaccgcacgagggcctgtagacaaatcgtagtcaatgtccatcaacacaactcggtgagacgagcgctcccgagataggttctgcctcaaatgtaaattttccgtaatgactggctggcttgatagtttcagtatttcgcgagctgccagcgcatgcatggatatctgtgcaaacgagtcgcagcggaatccgcctgcacaacttgataccgcgtttcatacttcagtcgaccttcatgacggtaccgccaggcgttacgacacttgccgtgtaccactcaggtacatctgtatccacttcatacccaattgagctgtcggtttaccggccagctcgtcgacaggcatgatcatctttaaagaacgaaacaagacatacggccatatgaaggagacatacactcaggcctgagcccacttcctaaaacctttgacaattaagatctagtgatgaagccaatcgccctagtcatcacgcgcctcttcatggtccaggctctcccctccgataacttctggtaaataccgtaacgttcagaccacccaaaccagagcgcctcctacagccatccgagtcttctctatggctgtcttgctccatcacgtcttacgccactgtaacgcgacttccgagcagtatccaacgctacccccgttgaccttttcgttctcaccaaagcccaggacagatgtctggaactgcacgtcttgccggcgaatcgtagcagaacacagacaggcaagtgtttgaagaaatggtgtgacctatgtatccgattatgtccgaccgtgtgaaaagaagaaaggccaacggcaagagcatcaaaagaggggttctcaactcccaataccacgcgatttgcatattcagatctttactgctgtctttagtggtcatattctactatttgcccctggcttgcgctacagaggaaagcgtccttcgccccagcagtctgtccttgtattttgcagccgggctgcccttccgttcgtattctcgcccggcttcccttctgttcgtactctcgcccattctcggacttctcgtgagcggaactctctgttggctggcgtggtaccttggactttgcagtatcgatgcgggttgactctggcgacgcgttgcactacgatctcagatcttcccaggtgttctgcaccaaagtctagtgatctctcttggatcttcgctcgtacatatccttggagctatttaaaacatggagagcgatctcgcaatcaatgatcgcataggcgcaccataataggcccgcgaaagacgccagctagctgttgctgacgtatcgtagtcgatccagtcgaatgattgttccagtgcttggtcttgcatcgggattgaatttcgcagcctgatagtcgcatgtaactgtttagtgccacgctcgatatataagcgaggcctctgtttcagaggattcgtccgcgcgcgtcgacataggttgcgcgggacatgagtaccgttgacaacttgagtcgaggacgcacgtagccgatgtagcgaatgaccgtgatctggtccttcgcgagagccctgggcaaaaaggtaaactcttcagtgtctgctccgccaacgagctgtatctatatgtaactttgggtttataccaaatagaccgtctcaatcagttggagagcgagtaaagcagtctagcgaacctcccgctggttttcagtgcatcgatcgatccgctttgcaatcagtccatattcaacctgtcgctcatctgcccggagtgcttgctactttgagctgaggcgaagcgacgatgagccagatgaatcaaacctcagcttctcacgcttgcttaggtagaagtcgattattcgccaggagtgtcgacatactgccgacagcattacagctgacgctttgaatggattgatgttatgcttgatgatatcgcttgatggttactgtgatgagtctcgtctcacgcccgggaggtcaatcacggcgtcttgacctcgacgagcctcgtgatgcggcagtgcggatacccgcaatccgcgcggtagagcagaccaccgcaattgtactcaacagtggggttcgcctcgagctacatctggatggcttcagcgtgtgaacggattgtctccatctcgtcgatcgaaaagcgtcgaaacatcggaaaaaaacggcgaacggcgctttgattcaagactagtctggaaacacaatgcccgatcttccgttacgagaaaggcaaatcctacgcccgcactcatcggccctatggacagagcattcaacgctatagaagagatttgttggtatcacaaacgtatacatgaaaaacattcacaaagccgacgctgcggtgacaatacaaggctcaggtccccactttcgagtatcccagagatggaggagcgatcttagggaactttgccaggccgtgccctcacgggcggactcgtcgtctttgctctcactggtaagcgaactgccggatccgatgggattggaaagcccgccagcctgtaaagcgtcgacgcgatcgaccgatcagcctgatatgctcgggaaccgattgaaagttggaggaacccggcagcgtcccgtagcctgtctcaacccaaaagaatggcgtaacagccttctctactgacctccgaaaccgcgcattcagcgtcgcctcccttgcttccagctcatgacgcttctcgcgcaaggacttttctttctgcgcaagtgacctttccctcgtgagcagctcttgttctgccgccttgagtcggattctcgcagcatcttccaaactgcgcgattgagcgcgatggccgtcatcaggttcatattcgttcgtgctgtcgagagcgacaaggggagaggtcgatacaaacttgtttcagccatccgttattaccgatgcgatattcagctctgccttctcgtatactgactcaccgtgcttgacgaaatgactgctggagccatcgtgagaccaacgggagataaagcagatcggcagtcgagggcctctttcgaggctaaggttgttggtgcagtgtatagtataaggaacaagtctatcagctcgactatccaccacgtacgggctccgaggagtcttttgtgaagcgtggaaagcgccttcataccgaaatggctaacaagtgcttcctggcctatctagactcacgtctatcgccagcaaggcgttcagaagctcttggtcggacgaagtgaaacctccaggtaatagcaggtcacgtgccctttcttgcccccggaggcgcacatcaggtagcctggcgatccgggtagtcgaaaggggcaaggtattgtgcgtgatgacgcatcgtcaacgagggtagaagcgcaaacagtagaaaccacgcggggtcaggtcagcatccccgcaacatggctcctagcaattgatgcgtcacactcataccttagcgtgtacatctcgaaaagaagacatcctagactgtagatgtccactttgtgattgtagctcctccccgcgattagctcctgttcgtgacagaggcaaaacaacgattgagttaggtggcagttacaacggcggttgacagacgtagccagcgatctgcacgattgagatccgtcgcagtttgctgacgagatgttccgctaggctctgagtcggacttacgggaggcatataaccgggggtctacacagacacacagaaatagggtgaagcacaaaggatttaggaatccaggcgagtcagccaaatactaagtacgtgcccagcccgtcaacccgccgatcaacccgcccctagcgagatttgcaacaaccatcgggaaggaaaacctagcacacctgcactcacgcctacaagacttcgagtcgtgctagtatctctgtccaagatttacccaatccaaagtccgccaccttgacatagccatctgaatcaaacagaactgtgtcacaccacacacgcacacatcgaaacggatgaactggtcagcctgactgaaggacggcgagatggtttctattcggctcacttgccgttctctggcttcagattccgatggatcagggtccgatgaccgtcatacacgtgatggtagtagtgtagcgccagtaagacttgacaaaagatggagcgagcgagagcaacgggaaagcctcgtccactgtataggtcagaaggagtaagaagatgacgctcggatcagctccatacacttctcgaccgaatgagaaggagaccattacgtatcaagcgattgcacgctttcgcagtatacagaatgatttgggaaaaggttgcaaaccgatcatcgcacgcaactcaccctgacgtccgagctttgttcagcagattcgacaagtctcctcccgcaaagtactccacgatcacgcactgctgatcatcgccatcatgtaccagcagttcgtgaaaggagaaaatatttgggtgcgagagctgttgcagcagttcgatctcggtatcaatcagcttggacagcgtggtcttgtcgtccaaagccgccctgaacgtcttgagagcgaacatctgcgatcgccgagcgaaaagagagaagacgacgcggcgttcatcgacaattcagcacaacataaactcgagaatagaagtggttcctgcagctcatatgaagtctgaggggaacggctgactagacgtacccgcccatctgctttccgcttcacgagccatacaactccgaaacccccttcgcccaagcgtctgacgctcttgtatttctggtcgaatgtattcatcgctattgagctggaccggtccggctagtgaatgtgaggggtgtagagatgcattgggcggccttggttccgttgacagagttacatctctcaaaccgccagcgaatcttgaagcgatagatggcggccactttttcgaatccagagcaatccctggccctgcctcaagcctatttggaacgtgtcgaggtcccggcggagtatccaacttgcagcgagttaaggttgttcgcaggatttcgatgtatagatgctcgaggtttgccttgaacaacacctggcaggaagtctagaccatcgacgctcgactttatcttcgtttgtgctagtcgttcccatcgcatcattctatggaccgctacgaccaccgcagtattgtagcagcacgaggtatgggcgagtagcgaaaggaagcgagcaacaggcgaagattgatcgccgttcatcgaatcccgcatgttctggcaagggtacccgcgatcgccccgaataagattgaacagcgatgtgatatagttgtgatgggtcacagtataactcaccacgaacaggtggatatgacgaacgatcgcaattcagtacgggactgatcgaacgcttcgaacgctattgttttccgtggaccaagctcgagggcgaattaggatagcgaagcagggtgacgcgatcaaagccccgtgaaaccgcgcatcccgccgaccagctcagaggagcgaagaggattgatctcgtctaaaggtctgcgagagcggtgaccagaagatgacccacaccgattttttgaaatcgacctctgtgcataacaacgcaatcaatcttctcagctcctcgttcgatgatcgcgttatgaaccgtccgatcgatcgatgtcaggaccactttgtgatcggaacgaaacctgtctgatggctactcgggcgaaaagccttggtacgtctatctacagcaaatgatggtataaaggtagaggtcaaggcgggccgtctgactttcaagtaggtttcgccctgtaacaacacgacactccaggaagaccattatttggccggaaaggtggtattctttagtacttccgccggcgtttcaaagacgccatcaggtcgtgagtaagcttagacgtcccctcatgacttagctgctcaagctgctagtagggtctcgtggcctcgaggtacgagcgatcattggcttgcatccgaaaggaccacatcagatgtccagcaagacagtcctccgacctcggatcgccgatctctagtctgacgacccgaagcttcatgaccttcatggatatgcattgcatttcctgcaaggataagattcgacgcagacgacacataatgcctcgctcttgctcctcaccgtcttcaagccttttaaaaacgctggcatcacggacctggactgggagccgagtctgcatatcgcggtcgcttcaagggaatatgaggtgagtgttggcatgactgagtccatcgcccgaatccgtcgacgggcctagaccggtcgagtagatatgggcaaaaagctagctgtcgatcaaaggcgaccgcatgcgaccgctcgagatgaggtgtcagacacatcgagttatccgatcgtcaacaggatgccctcgataggacagcgcgaagcttgagcgtcaagacgaactggacttactggcacttgggtaaggcttacgaggccttctgtagcgcaagtatctcgcagagcttcgagtttactggaccatcacaccgtccacgaatcaccgattcccaaaaaactccacattgtttcccggtaacagtctcaccaggccgagcaaggtctcgattggcagagtcgcggccagcagcagcggccgttcaccttactttgcgagaagcctgctttcgtcgcttccgcttcacccggtcctccccgcttcgccttgcagacgacgtgcgcgcaagttcctcttacaagtcaacgtcttcggacccttcgtgctgaacgcgatccctgaggtctcagccagccgactcgacattgtcaagctggacgatttacataagcttggtgagaatgggtcgaacgagcgactggaggcggtcgtcaggaagctggagctagccaaagccatggaggtaagatagtgaacgctcgtgctggaccttgtatgatggatatgcaggcttagctcgcattccgtaatataggctaccaagaagggaggatagcgtcttctagtcgtttctggtgactggtcgttccgccttggtgataggattatgctgctcgacctctgaagcgctgagagtacaatatgcgggtcagcccggcaatcggcatggcacgagacggaatccgggcagaatggcagcgcggaaagtactcgtaggatcgggtttggaccattccgcgatatcacctggacgtgaaattaccggcagaagaaggcggccaatccgtgacttggcatgagatcttcacgttgtttccggtcattctaatgcgatgatttcacttcgagtgtgattgaatgcgcaattcttcctgcgtaacattgcatcgggattccgtattcatcgaaattgtttccggtgcaaggcccactcatcgagagggtccttgaacacttgagggttgttgattgcaagggtaaggtgttacgggcgaggggttagacatgacaaacattttcgtctactatcttgttgttgaatatacaaagttgaatatacaaagcattcagctctctccgttgatagacagatgtgtattttacggtatccggctaattcagttggtctatccacgtcatctcgctcagtgttactgcggctaatatgacaaggccttagcgaccggtaggccgtcctatcgttccgtggtgatgcacgggctgcactgcgggtcactaatagcacgcagtcttttgtccgtcctgatctgctctctccgccgctgcttgcgatacatctcgctcgaccctttcagccaccagtacttcatgtttctcggacctgtaggttatactataagcaagattgtggcaattgccccattcaaccttggcgagccggcaccgccgtcttgagaagcactttccaggtgaccctggtgccgaaagccgcagcaaagattggcaacaggctagcgagttcccccagtccggcccatcggggagcgattctgactttgacgaacgcgccagaagccagtaacactgcaaagacgttataaaagatggaccacgcaaatccagccttgatatgccaacgcgcgagtcgagcgagagccagagcacacatgatcgaatctttgaggcggcgatcactggctatagtgaggtcggctgtggcctgcgctagatcagcacctcccccgatggcgatgctgatatcggccgcagctagagcagctgcatcattggcgccgtcaccgacataacagatccgcgcacccgatgtctgcaggtttcgaataatatcaagcttcccagctggactgcagcgactgttcacgtcggagggcgccagaccgatgctggctgcaagttgctccactggacccggtatgtcgccgctgatcataacaacccgtttgccagccgtctgcaacaactggaccaactccttggcatcagggcgctccatgtcctgcagagcaaaccgagccactgtcagacctccaagagtgacatagaagacgcttgaagcagcatctccctcttgatcgggcccaagttccgcttgagcgtattcggcactgcctccgagcagcgcaaagccagcaaagttggactccaatcccttgccgggatgtatcacaacctcagaaagtccttgtttgatgtgactgagcacgtcgggcgcgcattcaatatgagcggaaatggctttcgagattggatgattttgatctgccactaaagctgcgatcaagggcgagacttgtgggtccagcaggtttgcttctaggacacgcatcttgccttctgttaaagttccggtcttgtcgaacgcaaagacatccatatcgtggaaagaccatagagcggcagttgacttgaagatgatacctgtaccgaggccgatgttaacgaccatggcaatgaccataggggactatcgagatgaaggggatgaaaatcgggagtttcaggaagatgaatattcggttactcaccacaagtactagtgcacacggacacgccacagccactacagcgatagcgtaggtcaatcctagaatgcccgcatcggtcgaggtctcgttccgaacgaatcgagatacgaggctccaggctaggaacgagatggcagctacggccaacgtacagggcaatatgactgccgcaattcgatcggcagcatcttgtaccggtagtcgagtctgatgggcctgatttaccaggtcggccatcttggcggcgctattctcgtggacgaggcggctgacgtggatatgaagcggagctcccacattcacgcaaccagcgacgaccaagcttccaactcccttggtgacagggacgctttcgccggtcatacaggattcgtctatcgtgccttcattgtcgatcaggataccatctgcagcaatgacaccgttcgtgtcgacctgtatgatgtcgccgtagcccagaagccgcgtgtcaaccagctggcagcgatcgtggtcaataccagaggtagtttgttcgtcaacaagcaatagcgcctcgcctggctgcattgtttgcattgatgccgctgcttgcattacggtccgccgagcgtaggcttgcacggtgcctccaacatgcacaagggtaagtagcaaggcgggagtctcgaagaatggctcctcgaaattgatccctgcgatgcctagactgaaagccacaacggagaagatataggcggtaatggtgctgacggagaccaggagctgtacgtcgccatgtcgtaagtatacgagcgatttgatagatccgagccagatcgacgacgataggaggacgattgctgagccggccgcaaaggcgatcccatgtcgaatttcgaaagacagatccggtgatccccaagtcatgaccacagcgggaatcaccagcaccgagcaagcaaaggatcgcaagagtgaaaggtggtacgctcgtctagccagcatcctatgatcgtcagcttgatctcgaggaatcaaggtcgctccgaatggctcgaggtcgtcgagcacggacctcggtgggtatgtcttcggattgaacaagactttgtgaaaatgcttatccttcacgaccgtatatttgtcggtatcgttctgactgaattgcttctctgtcttgatcggcagcgacattcggcaagatgttcgatcgacatcttcgagttgaggaatgaccttgaacccggtcgcccgggtaacgaaattggcaacggtcgccgagtcgactcggtgaggatcatgatctaaggccaggcgagaggcaaagtaatccacctcgatagattgggttgattctagcttggaaacggcgtgtatgaccttgattgtacacgaggcgcaatccatgccttggacttgaaagacggaccgctggaatcgctcgccggccttgccgagatcttcaggcagtaattcggtattactgggttttgcagccggtatccgatgagattcaggcatttcgatcaacataccccgctctggtcctacttgagaccgctgtcgattccttgaaacaggaaggcagcaagcgagcttctcgcaattttttccgaatatgcggcagcaacgtcggatggcctttgagcctcggacagccaggtcattcatctcctgcagcgtctgaccagagacaagggctgaaaaggcaggtcaatggcgacatgtggatcagccctttttttgatcgaggttgtgcgttaacatcagtgctctgagggctcacctttgacggcagcggtaatgcaacaaggacaaatctcgtcgtccccctccacacctgccagcgctatcaatatacgcaagtgactttagtttatagttcatgctgctaccagaatgagctcgatttggaagtgatacttaccgagctttggatcgtgctccatcgacctgcgtccgtccgacttgatggagagcacgtgggcagaagtgtccaaagagcgatcattacgacatcctcccttagtgtttacgggcatattcgcagcggaatcgaaagcggtggtgtcgcagctttcttccatgtcacagcaggcttcccttttgaccgctgattgagggatataaagttctatagcctgttcgcttgcctcggagggcccacagcaactttccccctcggctgatggcgaagcgatctcattaaccgcctgtttcgagatcgaggagctacaacattgtttgggtatggcgaccggctcaggagacaaaccagcttccatattcgccagttcggaaacgccacgatactctttggctatggaagccgtccaaatgggggaagctacagctcgatttgccggtggtgatgatccacagcggccttccatcttggctaactcaactctggatggtacgtccttgttgatcgggtttgacaacccaaaacagcatccgacctcttcaactggttgaacgaaagaacttgcgccttgctcgacagatttcgaggtgcaacaacccttcggctgcgcaatcatgctgtttgtgattaaaggcgaaacaatagcttgatcgacctttttcgcatccccgcaacatcctttctgctctccggctttaaaggatcgacaagacgagatagttgcggcagtgttctgtagtcgttgtgggcagcagcttccaggactcttgcccgcaggagcagtcgacggagttggttgattaggtgaagggaccgtgtctttagccgacccgatcggccctaccatcggaccccaagccgacatcacgttcgacccgtcgactggagccaaaactgtgtttgacattgtgagggtgcttggtagactttgagagtacgggctgggagatttggagatcagctggcggtcaaagcccaaggtgagaggacctgtaagctcacgaaggtggagtatcgctttcgtatggaagttcgtgcatggctcaatttgtgttagggttctacgtgggaatcgaaatctacagagtctcaacaaaggtatacttgtgccgggagatctcttgatcacgccgctcgccctctacatatatacacgttaccgtctgcctgtgacatcagtattacaagacggcgactgcagacacccagttcgacgaggtctgtggcgagcaatttcggaaccaaacacggaattgagacgggttgttttcccttcttcttaggggttaggggttaggggtgcccccccctcgcccttgcccaccttctcttccgaaacgatcacgaaccgccgaaatctcgaaagctccgtccaggaggcgagtagcgagtagcgagtgatcctctaccaaaccaccaaccatcaccaccaccaaccaccacaaagttatacaaccccctacataactcgatattcacgccgtcttacatcgattcctcctctccacatcataccctctgcatctctcatcatgttgtgcactcgaaccgtaagtcaggtcgtcatcatcggcaaggacagacacacacacacctcgagcattcctgccgtcccgcagaatgaacctcacaatccacccatcacatgctgatcccccaatctcgctacctatcgctctactcgctatagaccacccagatcgtgcgaccttcgttcgtttcgaccttggctacgcctcgatcggccgtctctgccggtctgtccgcctaccgacgaggtttggcgaccgccgccgaaccgtacgatgtcgccgtcatcggaggaggtacgtgacaaagagctcggctcggttcgactcgggtggcactgcgtagacggttgtggaatttagctgatatgatcgtcccctttcgtcgtcattcccctctgtctctctcgccattactatcatctcgtgtcgatccgactcgaccaccacctcccgctcgacctaccctcctgcggccacccttgtcacgcaccgcataccaggccctggaggctacgtcgctgcgatcaaggccgcccaactcggtttcaagaccgtctgtatcgaaaaacgaggagccctcgggggtacctgtttgaacgtcggatgtatcccttccaaggccatgttgaacaactcgcacatctaccaccagaccaagcatgatctcgccaacagggggattgacggtgagtggcgacgacaaaataccgggaaagatgaacccggcggctgatcctccccccctggtgtatgtgcgggcgtttacagtctccgacgtcaagctcaacttgcccaagatgctcgccgccaagaacgcctcggtgaccggtctgacgtcgggtatcgagtcttacctgttcaagaagaacaagatcgactatgtcaaggggaccgccaagtttgcttccccgacccagttgtccgtcaacctgaccgaggggggcgagacgatggtagaggccaagaacatcatcatcgccaccgggtccgaggtcacgcctttccccgggatcgagattgacgaaaagcagattgtcagctcgaccggcgctttggacttgcaggaagttcccaaaaaggtgagtctcgacgagcgtgcgtgcgtaggagcaaagaggctgatggtacgactcgcccgtgtcagatgatcgtcatcggaggaggtgtcatcggactcgagctcggttccgtttggtcccgattgggatccgaggttcaggtcgtcgaatacatgggtgccatcggtgccggtatggacgccgagattgcgtgagtttgagccgaggtctcgtacgctatacgacgagacgctgggtgactgactcccccttcccgcatgcccccgccgcccggtcgatagcaagaacttccaaaagatcctgaccaagcagggtctcaagttcaaggtcaacaccaaggtcattggcgctgaaaagaaggacggcaaggtcatgctcaacgtcgagtctgccaagactggtaaggccgagactctggatgccgacgtcgtcctcgtcgccatcggtcgacgacccgtcaccaaggacctcggtctcgaggaaatcggcgtcgagatggacaacaagggcaggatcgtcattgacgaccagttcaacacgagcatcaaggggatcaagtgtatcggggacgccacgttcggacccatgttggcacacaaggccgaggaggagggtatcgccgccgccgaaatcttgaagaccggacacggtcacgtcaactatgacgccattccctcggtcgtctacacccaccccgaggtcgcttgggttggaaagaacgaagaggagctcaaggctgccggtgtcaagtacaagattggcaagttccccttcagcgccaactcgcgagcaaagaccaaccaggattccgagtgagtcgaaagagcgttcacgcgtggcgagtcgggtcgggtcgggtggcatgctcatcgtcgtcgtcatcgcgtcggtcgtcgtgatctttcaggggtatcgtgaaattcgtacgttctctcggcgggattcgttgtcacgtgggaccgtcgactgatcgatctgcttggctgctcgtatagattaccgagaaggacactgaccagattctgggagtacacatcatcggtcagtcgcacgagcgtttgttttcggatcttgcgctgggattccatggctaagacggctcggccacgcaggacccaacgccggtgaaatgatcggagaagccgtcctcgccgtcgagtacggtgcatcggccgaagacatcggcaggacctcgcacgcccaccctaccctttcggaagcattcaaggagggtgagtctcagcggacggcgaccgagctcgatacatccagggctgtagctgacctgtctttgttcacgtacgcctcagccgccatggctgcttacgacgagcccatccacatgtgatcaggtttcgcccgttcttgtatcacgacccatgatgagggatatcatggaataatgcccaaactcaatagatacatcttgatatgcaaccatcagcctttcgtctgtcgtctggtaccgtgtatctggtcgcctccattcatctcgagaccctgttgatagaactcgcttgcgtccatcaccagttaaagtcgattacaaggggtccgtatctgcgcgcgcaaggtttcgctcacgctcggcctagccatctacaacttgcggactccaaattgccactatgtgaagcaatgccgggtgagcgatcttctaaccagtgaacctgttcttcgccttctcttccgagggtccatgccgcatccgatcgtcgaaggcattttcagcggagcacttccatctcgaccgataccgaattcaaagctgtggcgtttaacaaggtctttacacaggactaaagtgctgcaagaggcgtggtagaggcaggttctatctctttacaaaatgtgtgcttggctctcggacgtgagcgattctacgcccgactcttgctacacaagacgatcccgctggaggctgttgtcatgatccaaggtcgatcactctagatttcccaatgcctcgcaatccattccagtaatcccgaatggataagactttctttcctgcttggtgcacttttttgacctcaaggaatgtgccttcttcagatagcacagatgcgcaagcacaccggatcagcagtcggtcgtttgtcctatcaaaataggcctgtcctggactcaggtccacgtcatccgctctggccaatccaacgtcgaggagttgtagcggattgccttgaaacgtcgtccagattggctcctgtttcgtacttcaagcgtgagccacggaccggaaaccgtccagcaggatcacgagactcgcctggaaaccaaacgctcgatggcgtgcttctatttcaagcgcactttgtgcgaggagatctatccgagccgttgttggattgatcttgctcgctttccgaaagtctccctccagtggctgcgggtacgaccgtgcctgccgatttagagtctgtcaatgagtatgccgaccggtgattgagcatgagcaccgatacatacattattttcccgtatccgtcgtagagtggacacaaggaggtcgccgccttttctcgccaagatcggcatcatactgccatacgttgcatgttcgttgatttcctgtcaaagacccattgattgagtaaacctcgtaagcttatgcggtatcgcagcatgctactctactcacgacacctccttcttgagcccagatatcgccgcaatcgacctttccccggccgagagcaagactttgcaccgtcaccccggttcgagcggtgcggtcccgccaactatcggcgatggaccactggataggagcggatcctcggtattgtggtaacagggaggggtggacattgagtcgtgacgaggattgagcaaagtaagtcttgaggaatggagtcggaatgatatggccgaatgaagcggtaatcaagattgggcttgaggttgggccagcttcgaggttggaatcagaagctcccgatggcaaaaatttcgatggtatctgggacaagacaatccgatttggactcagcctcttggttcttcatcactatccaggccggacaaacctgccaatctttgaagcccgttgaaggaaggatactggtgtccaaaccttgctcttccgcatagttcagaagaggcgctgaagtgagccgacagctgactgtcagcgagatgcatcgggcgatcaagcgggctggaagcttacggactatccggctcgaccctcgtgagcccctgcctatcgtcttctctccggacgttacgatcaagaggtccttataaagtcctggcttgctagcaagaagaggttctaggacgcctatggaaaaagcgtccccacctagaaagagtagcgacagcgtactgttggagctggaactatttagacagattctggtcgcaagcatcctttctgcgtaaaccgatggtgagcaagtacgcagagccgaataaggctggataggaagatagaatatgcctgagcagcattagatcgagaactcgagctaaagtgctgcttccgacctgcagcacggttgtccatggtcgatatgagtcatgtcccaggggaatgtcaggcagcatgtcacggcgaccacgatacggtacgtgcaggaaaacgtcgtcatcatatgatgtctaatccacagttgagcggatcgggggtaagtctgcggcataatcaggatcttatacaacggttgtgtgttcagtctatacaatataaaatttacttggtctgccgattgatggcgctgtgtgccagcaggtctagagcatgtccagatatcgagccgacttcgtaagattctctcgagccctgatttgtttgaggcagaccatcgtatgacggcactagaggctgttggtacgatctgtcttgcaaattgtaggttgtacttgggaaggaatgaaccgtagcgaaactgttcaagaaggcatgcaactccgggtcgagaccggtattgtgccgatcgaacggaatgtcagagaaatcaaattgatccagattttcggtcccccagccggtagttccggttatatcttcgatcgaagggatgggctggtgaacgcccggaatggctgccgatatcaaagcctgttggttcatgtagtggttgacatgagtcatattcccttggtcattggttgacgatgaagtgtaggttcccgctagtcgatcactatgataattgtgttgcgaacgagcagatgcttcattcctggcttcagtcggattgatatttgagtggtgctgtggattggatctcgattcgagagattccaagccttcggcatccatgaggacctgaacggccctaccgtactttctagccagaggccaagtttcggccatcttgcttagcgcttccgaacagctgtgtagcgctatctgggcatctagccgttttgtgaccgctccagaggcatcctttagacctctcagacagcacaaaaacccgatggcgatggtgaaaatcatgtagacgacttgcggttggcattgggataccgtcgtctcgcctgatagcgagttctcgagcacatacaagagcgccttgctcgtggttgtcgccatattcatggattctacggcgtcaatgttcgggtcgtcttggctaggcagtaggtaaacgggggttgtgagtttactgggcagtgtggaaggaaatgcaggtaatcgctcacaatggtcggaacagcaatagcacagccgtttgatggagtagatgtagacatactactccaagactgggtttcgaaccgaggtggacgacaagctttttcgacaaattctgatgccatgcgtccagggcttgctcgattggggccacgtcctgcacgtgtggctttcctccgagatacagtttctgctggattgtccagactatcccgagtagcgcatgagtagcatcaaagacgctcaaattatcctgactgatcgattttgatcctttctccgtgacgtttgtggctggaaacaggtctgtgtagagctggcatattggtgtttctctctcggagaagctgatggctggtggtcttcccagctgcaatgcgagctgaagatctaacatacacatgcaccgccacgacagggctttgcgcaaggccaagtgtgcgactcgtgagcaatcactcggtgcctgcctagaagcgatatgcatgttgatgtcctggccgatgcgaatggcaatgcctacgttatacgattcgatctgatcagcaacgtcatgcacgtcatcctgagatctcgattctcacctaacagaagccatgcttgaaagtcctgaccttttccatgttcacgcattgccaataagaccagagcctgcaccgtatccaagccacaccgttttctcagggtgaaggtcaagagcatgcccctggcttcctcataccaaatatcagccaatatccctccggctgcggcgttatcttcgccgagcgctgcaacattcgaggcggctccaccaagtgttggtgagaaacacgcgctgtacgcgcaaagcgccatcatcaagatgcgagagggcggcgtgtatgaaccagatcctgcattgttatgggatgggtaacgatatgcaaggagctgcgcttcgtccagtagaggtagttgtggatgtatgcgtgtcaaatacgtgtctataaggtaatcttgcacgtctttaggtggaagctggattttcggtgccgcgtgcgaagacagctgacgagggcttcgggccaggtcttcggtatctgcagttctcctgtagcgacagagtgatgagcatattccacgctatgctcttcgcactcctactcaccagaagccgcttgtgtagttcagatcgtatggttgacgatcgatggcggtcgaaggcccttctccgccttgctgcataaaatcctcagcggctctgtcctccggctcggcgatatcgtcttgcatcaacccgccgtcctcaacctggccgaaggtgactctattcttgctcctaggatgcgtttggctagtggtggaaggtcccacatccacatactcgtttgcgtcgtcgaaactcgattggaacatgcccatgcccatgcccatgcccgtgcccatacccatggtcccgccaattacatcgcctgattgctggaacaaaggatccagggcgaaatcacccttggacgggtcccaaccggtatctgtcgaatcgaaaaagctacctgcgttggcctcgattgcctgcctttttggaaagagtaccggttcatgctgatcgggacccgtgccattcgtccttgagccgtcagggacagctgaaccagatcgcatggatttcgatgcaggcctaggtcctggattgttgacttcgccagtatccgcatcgtccggagtgattgatactgatcttgcccgcttcagattcgattttgggccagtctcgcttgacacgggcatgtcgatttcgtcaaggttgatgtacgttaacccctcgcagtgctgatggaaggcagcaccccaatttgcccaatctttcttgaccccagcatcccccttcagtgaggccgtaaattgccggacattttggtcgagtgatgctgagccagacagccatccctctcgagaagcgaggtaacctataaagtactccagaagacgtgtccgatcggcgatccgagccaggtatccaggaggcgggcctctcttcttcctcttttctgagtagacgcattcaaggtcattctgggtgcagtaggaacaccgtggacgctgcccgttacactgcagtagtcgtgaacatggtcagattagggaaccaagcggtaacgaatgtaaatacccaccttctgtcgcttggcccgacaagtcgaacaagctatgtgcatggcgctgcttctcagtgcaagtgtaggcaccaccagactggcttcagcttaccgatagctgtcttgattggtttgcatcgatcgtcaggcttggcccgaccatcaccgatgtcctccatggtaccagtcgtcctgggcgcgtctttagccactacttggccacgccatcaggatatttgactgtatgatcggattttcgatgcgagaacctcgcaatgtttcgtcatttgtctctagcctcaccgcatccgaaacagtcggtgtaagagtattaatcgttatggggttcaacgttcttgcaaaaccggtctgactgacccggatgtcggtcgagactaattcgtgactaaccctggtccaatgatccaatgatagggggatctgacaattgacaataggtccaccggtttgcttccgcgacttgtcgcttgacgcactactgttccacgaattacaacgatataacgctaaggcatacaatggggtgtgcgtaaacatgaatccctgctcaaacgtacagtctatctagatgctccgcagagtaccctgataaaggttgttggcgttgtactctcgcatgacggcttcccgcattgccgcgcgaggtggtcgccttcctgtccataatcggaattgttcgtacccttgctcgaggagcacttcgatgccgggcagaaagacccaggaatcattgaggagtctcttggaaagttggaaaagaggggatcgcgaaatgtcgccttggaaagtcatgtcgagcagtaccccgccaccttgcagacccaataatccttgatgaggtctcgtcctgaccgcattcgggtcatcgtcgtcggggatggggatcgcatagatgataatacgcggttgaaatgccatcttctgcagagctttcggttcgatcgtctctagaacttggatttgcaagcgcggatcgagtctcgagatatcgctggcgagtaaatgggccgcctttgtggtacgattgaccagcgcgattttagagacaccgaggtggttcaaagcgtatatggcagctctcgagacaccgcctgctccgatgaccaaagccgtcgtattgacgttgagcgcattctccggagtgagggcgcgagatatacacgacctaatacccttccaatccgtattgtctccaacggggccggttggtgtggcggtgatggtgttaatggctccgattgccttggcgtgtttcgataatcgtcgcagatgggtactgatctcaaccttgaacggtcgagcgatgctcgcgccgccgaaagttggatcattgaggatggcttcgtagatctcgacgtcgtcagactccgtaatgtgatatgtgtgtggcaatccgagtttcctgaatcccaccgtgtgcatgattggggaagcggtcgtcttgacgtcggcgccgaagatgtggtatttcatcggttttagcagtcccgtcagatagagaacctgtacgatgccgacggacattagttggatggcaaatctcagaaccgatccgacttgcttgttgagtttctaggtacgagacttggcctggaccagatattcgaggcatagcggggtgcgccactggggtcaggaaatgattgagtattctcgacatcttcccctgcaagcgtttcttttattagctagcggaatcatgtactggctcggcaaggcccacctcgggcccggtattcagcgcgatcaagggcacgtgttttaattgcatttcttgaacgaacgcccgtaagctgagattgtcctggaaatctctggcatacccgatcatcatgacgatgtcggcgccttcccgacaggcatgatcaaatattgatcgcacttcgggacctgaccaactgactctaccagccatgtcgtgccacgagatgacgatctgcgaattgcccttgtttcggacaagcgaagaaatggtttctggcggcgatacgatattgacgtctacgtattcgatgccaagtttgagtcccagtgaaagggcagctttttggtacggcaccatctccgggtcgtctttgaactcggggagtccgccagtctgacttcgtgtcctcatcgtaagataaatcggcaaatcagaatgccgccgcaagagggctatctgataagccagagactcggtactgcgctccgctaaaaggtcgattctcaactcccaacagtccacgccgatagagagttcctcgaggtgcggcaaagactcggacacatcggtgtatgtcaaggacaagaggtaagttcggaaagtcgtcatcggtacgtgattggtgtagacacccagcacgaaacgaagtagtcggatgaagtccgattctaacaccttcaggtgagatccgagccgctggctagccgtcccaccgccttctacaggccgaacaatgttggattgcggacacatgtcttcccaaggtcggtaggccggagggtacatgtcctcggccgacaagcattgcaagttgacgaaggacgatgtgcacgtctccatcaggaaagcttcggtagcgtcccattcttccgccagcctcttgaggttcgctttgctcaaacttttgtcactctccaagtactttaatgagtgcgagatgctccgggtaacatgaatgacgggtccaccgaccagggcaaagtgctcgagggctcgaatgcattcgggatcggccaaacgatcagatgagatgacaatgactttgcctcttctattgccagagagtatcgcaggaaggtctcgtccagacttctgacccgcgtacgaatcttgaccgagaacggtctcagtctcgatgacgtcgcaccacaacgcttgactagcgatgaaggctacggtcgacttgccgactgcgcaaagaggacggtcagtttaaatcatcccactagaaagcaagtacactgacctcctcgctggccgatgatgaccatgcttgcatccctgccatatcgctgatttacgggtgtaccgggccgagtcggagctctgctcggcagagcacgagcgttgtagctttgcatatcaatcccgacccatccgtcacgtccaagggccgccgtccaagaagattttatgatggcgtgcagatatatacgcacgttcggaactttggcagggtaaggttatattggtccatttcgatgaaatctgcgtgctgcgaccgagggatacatcggatcttcgataatagccatgatcggcttcgtgcgaccacccgagaactggtgggattgtcataacgcatacccctgaaacttagaacgcataactttgcgccaaaccgattctacccttcatcggctgttcattttcatcgtcctacatcatcttgctagatccccaacaacaattttcacttgcatagcacttggtactgatgcgcttgccatgaacaggttcccttagcgacgtgggatttgcgcgtgaggctcggtgccgcattgagcatcgcttcaaatgctgcaattttaccgcgacgcgggaaagcggaggaccacaagacctttaaccggattgctttccatcatggttgagaccgaatcatacaaggtaagtacagaattgctgcatgcttcatcgcctgagatcgcgaacccattctatcaaggacgccccatctttcaaacgtattcctgtcgcgactcgacggccttctcatcgtctccttcgttgaaagctttcgaggtgatggcggtagcatctcgctcgtcccggctttcccgagcccgctgcatgataattccgtgggcctttcgaggaggcagggcgaacaaggcagacatttcctctagtcgtacgtgggccgtctcggggacgatgaaccaaacgacggggatggagagtaccatcaagctggcgaagaagaggtacactccgtatctcatcgagttgaacatttcgggagtggccctggcgatggcgaaagcgaagagccagttggaggcagcgatctgtcatcattgattgagatcagtgccccgatcgcaaaagacgagagaaaggcgattttggactcacaatggcctgggttgcggatcggacaaaggtgggcatgacctcggctccgaaaacccaaggagtaccgttccaggtaggtccgtagaagcaagtccagaggtagaagaaggcgatggcagacatacccccaccgctcaacttggtgccgacggggttgttctcgggcttggcgacggcgatgtagataccgatgtaatacatcgaaatggctccaccggcggctccgacgatgagcaagggctttcggccgaacctgtcgaccaagtagagcaaccaaacgatagcacctaggaacttgatgagtccgctacgaacggaaagaaaagagtgataagctactagagtctgaagttacgatgtgggcgagtggcactaacaaaattccggtggtcaagagcccagtgttggtaccggtaactccgatagacctgaagacggttggcgagtactgtagaatgttgcgagatcagcctcggtctcgctttgcgcgggcacattgacactcacgtagttgatcgcgttgataccagttccgttctgcatggcgaagagtgagacggcgattccaactcgcttgaggtattcgcgcgacttgaagagcgttcggatgggtcccatcaatccagcgcctccggccaattgatcgcgttcgtgggcaacctggatctcttccatttcttccgccacgtatgggtggttcgggtccaggtttcgaatgtaggccaggttctttagggcttcggcgtccctgttcttggatgcgactaggttgcgtgcaaaatagatcgtcagctcaaagcttgcgatgaagacgagttgatcgtcatcgactcacgccatcgaggagactccttcaagaagatggcagacaaggccaacattccaccgggaatgagctggaccgcgaacgagatgtgccattgcttgttaccataaggaatgttcaggttgataccatagttgatccagaaaccgacgacggcgccaatctgccatccggcttcatagataccgatcaatcgacctcgaatcgcaggaggcgagatttcggcgacatagatgggctacggaccggtattccgtcagctggcaggtactgctcgattcgagcgatctactcacagtcaaagcactggcaacaccgacaccccacccgacgataaatcgcccggcgtacataattccaagaccggtgctgctgttggcaacgacttgcagaacagctccgacacagaaaatcaaggcgcagaagaagagaccccactttcgtccaaggtagtgaccgacagggtatcccgaaagactaccagcggcacatcccccctctgcagatacagcaacaatcggaaagtcgtgagcttggccagaatccttggttgcaattcaaaatgtgccacttacgataggtagaaacgatgtttgcagaaagaattcggaagctcgccttttccgcgggagtagtgttcttcaagccaaactcgtcgaggaaggattggagcgcgagagtggtaccgatgaaggcagactgtgaggcagagcagagcgtcaatgaggggttatagggtttggtagattcccgaacttcgcgcatccgactcacgtcgtagccaatcatgaccgatgcccagcaggccatgcatgcaaaggtgtagaccttccagttgtagacctccttgggagtcggacggtcctctacgatggtaagcttgaccatcttgcaaagtcgtttgcgtttacaagttgttgtagttgtaaagtgttgtccggctcgtccttgttcgagcgcgttcaagtcgttgggatcgtggtgattcgacttgatgtctgtgcgtcatgcaatactcgatgtcccccatctctctggtcgaatcaggtcgttggggtatatatcctcgatcgttttttcgggcgagagtcataggtcatgggcacagtagtggtgaaaatcgagggggagtgcggggaaagggccatagtcgtgcagagggctggaggcggagcttctaagcgagagaggggggagcaaatgatggaggggagaaactgctgctccgggaccccgcacgtcttcagccttttgatcacttcccaatttctgggaacgcgcgcggcgacttgtttcaaccaattggaagctttccggatgctcacctgatgatcaactctggatcgctgagcgcggggaaaagataccgatcaagaaagaagggggcgttgcatgtctaggaagaacagtattcccgcgccggattgatgaactgatgatccaccccctccccgtcgaagccgatgccgatgccgattgcaaaatcaaaagagtggagaaagctggagacagtcttcccggaagaccgtgggctatgcctgtacttgcccatcacataaggccatgaggtacgctttggcaatgtgttgaaagtcacgacccatatctgctaagtctatcaaagaaacccttaccaagtcctgatagcccaacactactcgcccatcaacatgtcgcctagcatccacaagtccgtctacctctttggctatcctatcgcccattcggctgccccgactctgcacaacatgtgctttcagagcatcgggagcccgtgcgagtatgctcgatggtctactaccaaggtcgatgaaaaggtcatcgaagagctcaggagtcacacgtcgggcggagctgcgtgagtcgatcgataggagtaggcttcgatttcgttactgattccacggcatgccgggttctacagtgttactatgccactcaaagctgagattttgaaacaccttgacgaagtctcgcctgaatcctatgctactggagcatgcaatacggtcgtccgcgttcagcgagaggacgggagtgtcaagctcgtcggtaccaacaccgactttctgggtaagtcccgcataagtccagtctttctttacgtctctgggcactgatgacatgtcgtcttgcaggtgtgagaaattccctcgtatctgcactccaggcccagttcccagagactccctttgatatttcccagacgtatcccgctggacaggcttcgggtatggtaatcggagggggagccacgacccgatcggccgtccacgctctgtacacgctcggtatgaaccccatctttctggccaatcgggatgccgacgaggtcagggcgacgatcgacgaattcgcgttgaaacgcaagggcggcaggggagtggatttgatccacctgacaagcgtggatgaggtcgagaggtacttggggcccaacgcccaggaccgtaaaccaggcgtggctatgatcgtcggagcaatcccaggtgggtcgcagctttctcacgcacacgctggtcagaggtcacgtaactaatttgaaaattctcgccgccatagccatcgcaccaaagtcgttcgaagagcgaatggtctacaccatcgccacccacatcttcaccatgcctttccaggctgggtcagtggactcaaactcgtcgaacccgcttcctctaccttcaacaagactgttcctcgacatggcctacaagccacgactcacgccgttgctgcaaatcggttcggctttgggttggcagaccatcggaggaatccaggccatgatcgagcaaggactcgcgcaacagcgaatgtggaaagttggaagtgcgagcttggaggtggcctgcgataagaccttgctgggagaggagacggagagcaaagccagggagctgatcgaaaacatgaaggatatcacgccgaccgagttggaagtcgacagggctttgacctagaggtcagacgtcgtaaacgtcgtgaattggctgttccgggttgtagacatgtagctataccgtctcgtcgtggctgtaacatattggcggatcctatcgagcacaaatggcatccactttaccattacagaagaggcagcgaagccgcgtgttaccgacctcgctgttacctcatagagccttgtgagggatcaaactccacttgtgcggaacgagttgcgcgggcccgggaagagaaatggtcccaggtgtaacgagctgtcaaagtatgcaatcgcagcgaattagtaggtaggccacactcggggacaggctgagagttatcggagcggtcatgcatcatcttgttgcgcatctatcgatctgttctcatgatattattataggtgcatacaagcttcgtgtaactttcgtagaccatcgattcccctctgcccatgactctccgccgtctttgcatccaagctgtcgagactagcattgaatacctccaaactccagacacccttgtaccccatacgcctcaaggtattggtaaagtcgagcacggggagatagccctgcttctccatcggaaagaggcgcatcttccgcgaccaggccatccggctcgggaaagtagggaaagactcgataggcgcatcgggcttggcagcatctgccacctggtaaaagaagatcttttcgacaggtatcgttcgagagagtttgagcagattgtcggcgaggactgcgtcggtcaacggtaggcgtccggagggttcggatggatcagcccattgtcggccgctattgaggaacacgatccacgtcaacaccacgactcgaatcagatttaactacagccaactcacagttgattgaatgaatcgaggatgacgcccacattcggtagatcaactcgatctgcgacttcccagacctcctcccagcggttcacaactgaaccccatgcgagcgcttcgtggccgatcttgactccatatgtactggcaagatggcccagctcggtgaaagcggtcacctgatcgtcgaggtagtcccgcttggagtagctttcgcttatcgggttgtgaggcaggagattggaacagaccagcaacaggtcgcattgcatcgccggcatgagacggatgacagactctgctcggtcgagcgccacctgtagtcgaggcggaagtcgtcccgtcttggccatccggctggcaccggcaaagttttcaaactcgcgaaagggttggaaacagctgatcacgagtccgtattcctggcaatatcgtccgatcgtcctggcgcacaacaattcgaggtctttggccgcttcgacttgtcgccactcgtcgtcgtcaaacatggctgcatggtgaccgacgccgacttcgcggacaaaggcgtcgaaatctgggataaagatttcaatggcgtcgtagccaagacgtgacgccgtcctaatctttgtcgggagatcgtgatgcacgttggtccctagggacaacgaggcgatcgagaatgacgggtggtccaaatcaccatgaatgctggtggctggtgtagagatggtcatggcgtacccatcgatgggtgatgtcgagagcgaggtcgtagcggatgaaagagacatggtgcagtcgtaacttgtctatacgtcttgggaagatgtttgaaggccatcgtttttggcggtcaaagagaatcacctgagccgggtctgcctttttgtttgaagcagaccggccgcaaggcaaaagtaaacggcgaatttgggaacaggtttgacctcgtcgtcatgtgcggtctggaactagttcgatcagagactccggcataggggtcgtccggagaaacagatcgtccaccgattcgacaaccttgaccaaccccacatccaccgcggaatgactccagactccgaaaaggcggagactcctcacttggctggatggattcgatccgcctttgcttccgcggggaacacaggacaatcacattgatctgtctgacgtcgccgtacattgtcgagagcgcgagagcggtgctattaccctgatctccggctcactgttcattcgcaagctcgcacagtcgcgaacacgccggttctgcacgataggacattacaaattcacaggggaacaaccagtgtgctcgcttattcgcctcgagcatatcttcccgccgttaccgttctccaaccacaagaaatgtccggcattcacgtactcgtcatcaacggtcccaacctcaacttgctcgggactcgggaaccgcagacttatggctatgacactctgagcgacgtcgagtccaagtgcaaaaaggcggcagaagcagccggaggtaaatgcagtacctttcagagtaattacgaaggagctatcgtggagagaatccacgctgccaaggcagagggagttgacgggatcgtaatcaacgcaggtcagtctgttgtctgacatgactgtccacttgcctgacctgatcgtagtgcgaatcactttgatcctcgatggagctcaggagcgtacacccacacatcggtagccatcagagacgctttgctgggtgtgacaattcctttcgtcgagctccatatcagcaatgttcacgcaagagaagcatttagacaccattcttacctctcggataaggccgttgctgtggtatgcgggttgggagtaagcggatacggcaagtcaggcggccatgcgaacaacgtcagagggaagactgacgagatctcggttcagactattgcgttacgcacgtatgcaaaacctttacgaagcgagagtagaacgtagctactctatacgacctgctaatactgccagccttgagccagacgatagagccaaacatgtttgcaacttgccgcacgtgcaagcatcaaaaaggcgccgcgagtggttcaagtgtctctttggtttgtgcgctgttccgacccctttcctgttcgtcaagccgctcgtagcatgtaggacacggaaagtgtagttcaagctgtagctcgatagagatatctgtggcgggacctggatggatgtctgcccgaacgagattgcgaaagcaccggaacgaagccatcatcgccgagaggtactgatcagccgagcacctgcagcagcgtattatattatatatatcagtgtgaccttgtactgtggccagtgagcgaatcgatccacttgtacatgggttctcagctgttttaccccggccaaatcagtcaccgtatcatctaaaacgaatgatgtacttgctgctggtgacacagcaacagcatggcggggatgcagggaaatgatacccagttgatccgtgagccattgcgagtgcaaaagaaatgtcgtcttgtacgggatgtttgtcgttcaccccgaagctttgcaacgaaagagattcgagccgggtcaaacataatttacattcttaatgaccagaaagggttttccacaacgagggttatcgacaagtctgtatcgtgccgttcgttgtaagacgatagtccagtccgtgtgtttgcgtcggtgttcgcgcacgcacgggagaccgtgggcagctcggcgactgcatgtcatgttgatgatactgtgtacgtatctgatggctatatggtcaacgtggctcgatagggatgtcagatatgcagatcatattcgataaattcgatcaaaaacagcgcgacaacacgccaaaaacaaaaagatgacatgtatgagattcgaactcatgagccgaagcaccagtgggtttagaataacctaaaactggccccttaaccacttgggtaacatgccagctaattttttttccctttttcttcgaatccgatcccatcaaaaccgtgccgtcgtgatgacttgattggggggcgctgccgatcacgagcacgcggagcttaaagacagagcctatcgtaccaacgttatcgatcctattcttgacggctcatcttcgtcttgcctgaaccgtagttctagcaaactggcagtggtgacaccgacgaacccattcgggcgtcgtcttgagattgtacgtgtagatccatggtcgcgtggctgccttccctgagccttcccggaacctccttgaatggatcacgaagatatgtgtacacgatcgtatatgctatatattgtcctccgaaaagcacccacgaaaactggcaaaacgagcccttgtattcgacctggcacgaaaggacgacaggatagtgaacaaagcccatcagcaggggtgcactcccacaatgccgagatccgtgcttgctttcgagcgcccagaaacgttggaggcacccgtccagcaggcgtacatcactctgcatcagcactcatcagaaaagccgtccgcgcctattcgggtaggacagacctggaagcgagccgacatgtaaggcaccaactcgacgagtcgggtgatcctgccgcgacgtggccgagtctcattgaggcgacaaaagaaagaaaatacccctcagcacctttgttaacgacgcggtcaagccagtcggcgcgactctcgggctcaagaactgtcgaatactatcaacgggccggtcagtcggatggagcgtgcaaagaatgcatcgggtaggagcgagcacaggtatccacctcccttgcgaccacaacaaagagtctgcgtgattcgtcgacgagctttgcgtagattttgagggtgacctggtcttaggtgagcggggtgacgcttatcctctttgaacatcgaggcttacgtacgaccatgccacgagcacagtaatcgactcggagctcctcaagatccgtgtctcaatcgtacggagtacaccacccggtacatccaccggttgccatccacacaccgtcgatttcaatcggcttgccgtcaacacgttggcaatcgttgtcctgttcgaacacaaggtcgccgtcgtcctggtcgtgcttggatctgcccttgataatcaccctttttcaagcggttcagaggcgggccggctgaccacgagccatctcgaagagtcgttgcgcttcgtgcgtgtaaaggttcggcgttctcaacattgacggatatggatgaaggaagagcgtcgttacggaaaaatcagcccctgaagaccatttttcgacccgtcgcgcggggacggagcaacttacgggttgctcatcatcttgcgtgtctccatttgaattatcaagagccgaatttgggccgtcatggcgccatcattttctcgcgttgattccccctttcatacatatgatgacatgatcgtccatgtgttccccttaggctccccatcggcacgggctcatttcgaccgtggccttgcgtgattgcgtccatttccccgctgtggacgcggcccgtggatagtgtatgtgtctgagtttctcccgaaggtctgaccttcgccggcggatcttcttctcctcggcgagctcatcccccgaggggccaaagcttggactttcggttgttcattctccaccagcgccgattcggctccgggtcgctctttcttgatcgacctgctcgttgcatcacatcttgcaccgtgagcgatagaggcgatcccgaaagagtcgcgcataccccaaggatgtgtttccctggagtttgaagtcagcccgacttcgaaaggacagaataggcaaagcggcagcacgcacctggcaagttcttgtaccccatggtttggtaccacccgaccccccatttgctggcgaccaagttatacttcaaggtgcacctcgtctcgccgcttgtggtgccgttacagcgcccggaaagactgtagatcctggttctctacgtccttcggggcgaggattttctggttgatgacccaggcatacaattgattgttgagatggacgtgggcgccatgttccacgttgagccgcctgagaatggacaagcaggccacgccgggctctttggcagaattgatctcgtgctgcaagttggccaacatcgtcctggcgatgcgcttcgagcggcgactagcaccgtatcgtagctgtggaagcggagacaggtcgaacgggccgtcgtcaactggactttgtcgaatttcaacggcgcagggacgggtcgaacgggacgtcgactttgaatcccgggaggttgttcccttacggccagaaccgttccggcatggcgacgcactgacgaaatcgggttacaactgcacgtcatcgtgcgtcatcggtcgccttggaattcggcgcggacacctctactcgaaccgcggaacgtttgagaagaccgctagaattacatccgcctgccaggacgcttcatcgtgacacgccagagaaccgggtgagttctgatgagcgtattcgccgtcacggacttgtcagtagcgttatgtcttctccgtcataaagctcatccgaccataccatgcggatgctgcggatgctctcacaaccataggcgtatctcgagccttttccctgcgccctaccgccatctccggattctccagaccgacaagatggccactgccgaccaaatttaccagttcagacgcacggaagccggcatgacttttgagaatatcaccaagtttcgagaagctttcaaagagcaccaccacagggcggtcacagccaaacaggtgctcgaggcattggcagacaaaccggacggtaggccaccgctttccgttgcgaaaggaccttttgctcacccgggtgtgcattcgatcagttcgtaacttttccaattcagggcaggccaaaaacccttacatgctttcgtcggcctgcgaagagtataggcgagtctgagatcggaactggtatgacaacctctaacaaccggccctcttcaggaaccggctcaccacccgcgtaagcgaacttttggggatcaccggcgagcctgatccctttatcctggccttgatcccacccctgaacgacaacgagctgtatgggtaccgtcgtccaaacgtttacttttctcaaacattcggatctcaaccttcggaacaggcggacatgtcggccagcaccaagccgactctgccatctcgacgacctttcagcagttgaacctctctcctttgtcatacacgaagagagcaaagggacacatttgtcaatacgttcgatcttttgtgctccaacactaccgtcatcaacctctctcggaggaagcttggaagcattggctcgggaacacgtctctgtccgcggacacgccggacacaacgcaggtgaagaagaggaaggatatggtccccatggatgaagcggtatgtgctctacttcgttgcgcatgtcactgttactgattgacgccttcaatgggaactggacgagcagcaccatgacatcatgattgccgttctccatcacatccacgactttttctcggtctcgggcttctcctggctcacgttcatcagatatctgactgagcctatgccggatgatataaggtcagaaccaggatcctttcttgcgttctcgtagctaagcttcagtcggtatctgactgagtccgtcgacatcagggaccacttcaaatccgtcgtctgcacctctctcttggtggctcttgatctggaagagaacaaagatctgctcaagaaggtcgcattgcgtctccaagcgtcgtgctttctggacgcctgctttccaggagtcaccttggttccttttgtcccggcaatgtaccgctctcagtcggaagttcttaagacgttggattggcagaacgagaacggcaaagtcctctattggcaggtgagtcctctttcgctcgggctcgagcatggctattgcagatgccggatgcgcagacgccgaatgcctgtcctagacgtctcgtacgttttacactatgacgtctcgggcgtctggacaggcgttcgcatcgagttcgggtccatgataccctcggtattccgtcggtggggggactgacctggattcccgcttcaggtgtctgcccgcgtgacaaacattcgtcctactggaggcaattttaccaaagctatcgagtcttggaagaggaaagagcagttattacgttaccctcctctgatggtaagctttggcacgctgacgggtgttatgagaccgacaatccgagactgacaaacgcgtcgctcccaacagtctggaccgttcaataccgtcgatctggctatgtgcgacaggtgagctaattatcgagttttaatgatcaacctgtggccctgacgcaaaccctctgattacgggcataggtattggttggacggctacccggctgctcttatggcagaacggatgagtctagttttaggtaagcgacggacaaagctttgcctcaagtgcacgcgtagcaaaagtctagatttgtggctgatactcggtattagggcgtgatctggggtacatccgcttagctctgggagcccatgcttggcgatggacctacaacagtgacgggactagggtcgttgtcgagaatgccaaagactgagatacgatacctcgtgttatggtccacctattctcgcaacggaatctttctgcaatgagcggaatagggtcgatatagagacattttgtactcgtagtgataagcgaaacatgatctatcgattgtcgagatatgcgagatattgggcgtttgtcctgcggcattaaaacagggcagatggtgagacatgatgcggtgatcgtgtgtcatattgatggacgtaccatagctatcccgtcctctgctttttctgctttttcatttgcggtccggcatccgcctctcccgactcctccttctttcgtttcttcgcagactccaccatcgcaaactccaccatcgcaaagtactcgggatagtacggaatgtagacgggggtgtctccggtatagcgcagactgtcgacaaagatcttggcggcctctgcaaagatcttggcctattggtgatcatctttatctttcaagatgatcagcttgctgatgactgagccagtcaatgtccagatctggggatcaaactcagccaaagttagcagcgcaagctacctgttacgggcaatcggcaagccgaactcgccctgtgacactaccgccatctcacctttttgttttcatctctggcttttgtggccaggaaataggtctcctggaccaagacttgggcaaacgacatctgatcactactgtcgagatcagggaaggtgcatatcaaggtggattccacacatgaagtgcatggctagacgaatttaatctgatgatcaatttctccttgtagatagcggaaactcgtaccttggtagggctcccgttggcgcaaactttccccgtcgtcaacaggcaggcagaacatttggtaggtcttcccatgatgggaggcgtataagtcaaagtcaacctacaactcaaagtcaacctaccgaacagctagaacagctagaatgtccatgaacacgacttcacttcatagcagctcgatcgatccggaagcgaatgagtcatctgcatccggaggaaggtgaagccattcgagtaagatcaagaagcaagaagccaccgaaatgagagcgatactactctatcatcttccccaccccttacctaccaccatcaattcacccaacagcatctcgacagcatctcgacaggatgccaaagccaaagcctcctacaccggcagtgcttgctctacaaaaggctgaggccgaattgcccatcttgcgacaaaggttgcagaagttgctgggccagagcgaagaagacgagctgacctctgaggatgaggatgcttctgccgatgaatccagcgacggcgagacagccgtcaacgaggaagtcaacgaggcggcattggaaagctcgggtgaagagtcggacgaagaaggctcggatgaagaaggctcaaatgctgaaggctcggatgaagactcggatgtcgaagactccgacgatgaatgccaatacaaccatcctttgccctgtcaggaccaggtggagatccaaggggtttgcgaggtaacagaagaacttatccgggagaccctcacgacgtacaacaaggaggccatcgactggataaaggatcaccttcactgtgaatcacatgcttggtgatcccctgagccgcgagccggtatgctcacaatcgctcttctggcagtaataacaacagaagctaggcaggccgctgtcattgcctatccttgggtgcagacgacattggccgctcatcctcatggggagtttgaactcaatgggtacgtccagccctttcatacgcccaccccttccatacgcccagctgcccgacgcccggcggcccgacccccttcccgacccgcttttgttgactcgatcatctggtttcttagtaatcgtctcctcagccgtcgtcaacacagcttccccaaatcgttgctggaaggggactggttcaagtcgttacacgctctagtattctctgtgcacccggaattagctcggtgctacatagaagcggcaaaatcggatgcgagccacatacctccggcctcggtcgaacaatgtcttgttgaaacctcggatgcctctcctggaatctatgcatacaacacccatgttgaagcggctcagaagttctacatcgggaggagccagaatatcaagaagcgattggcagctcaccgcaaccctgcggtaatcggcgtcaactcgatcgtacgggctgcaaaagccacgactgacccgactgaatggacgagcggagcccttgtcactttcaatggcgacactttcaacggcgacttcagtcacgtgccaataggcgtctggtcagctgttgagacctctctgattgcctgccacggaagcacaatgagtccagggaaggctcagatcaatattgttgacaagtgcacgctaccacgccctagagtgtcagaggaggtgctcgagacacttcatgaggaatttacgaggtgagtgtgacaacctcatatgcaccactatcgacttcatccattcccccgcagcggcaaatccttggatgagatctcgaaaggtttcaacatcgatcccagctacattcggaagcaagtctttgtgctcagcgtctgtattctgtccgatcctgcactgacatacgttaattccctacagattgttggaagggcattgcagttacaaggagtttagccgtggcgggaaacacgagctgttgcacgttagtcgagacgcgcaatacagagacgcccaccaacatgactctgcctgatctgatactatgtgatccgcaggactggcttatcttacaaagactacgtatggagaacccttgcgaacagcctgtgactggtaatggtgatcgacgcggccgagtcacgcctctctaccctcgcgtaaagtcgctggggtatgggtatgtcgggagagatttcaattgggtgagccgcaacctggtgcgagatgttattgataaacaccaatcagtggtaatggggcttggaaacaggcggaaatgaaggctccaagcaggaatctggatcagaaggtccatcccttgaggagtcgaggggtgaacgagatctgggagctgagggattatgccatggggattacatcaagacccctcgccccgctcgtcttcccggtggatgaatacaggtaagtcagggcaaaccgagcgcatggataatattgacctccctgtgcagacaacaggccgagcagatgtgcgctgatgcatttgtcggtggtattccagggaacgtctggactgtagcgactaccgaagaaaagcgtccccctccgacttcagttgacgaacccgaatcacaggacccttgaagccgactagaatggcagtataccgtggccaagggagtcagttacgagattcaggacgacagcgtacatcgatcgattgcacacgaacaagccgaaaagcatcatccagcacgcgttgcattttacaacggcagttccgggctaaactttgggcttgtgggacgaaagcttcctgataacgatatctacgactcacagaggatttgtttcggaccggggcacgcatgtgtcagacacaatactacatgtagaggatgtgtttcaaccgggtacgagcatacgagcatgtcacgttcaggtgaccatgggcgggtctcccctttcgcgtgcacgttctgtcttgaaatcacgcctttacactagacctccgacgagcggcctttcgtcatgacctgcatctcggtacgaacgtgagtgtcacccgttggtgctttccggtatgtattattgcagtcaagcttacgtcgacgcggtaaacagcaaagcgagtgcacgccattcgatagcaacatgttgcagtaataatacaaccacccttgaactgacttgaacccgaaacccggtatgtgtacgcatccgtcacccaatccgagaacgcttccatcaggtgagcctttgacgcccgttaagcagggtcgggaggagtcttcaaagtcgacgcttgcttcgatgcaagcggccaaggtctaacggctcgcttcttcgaagtcgtcgcccgcttcgcaaggggtgcagtcgattcgtctttggtgcattccctctttccacttcaaagacgcaggagaggcgttgggggactcgtcgggcggagaggccgctcaaggcagagagccgaagctgtcggtcgggaccctgttcgctttgacccgccgtgcagacatgaggggttgaatttcgtgcgcgatcggtggttgggtgtagcggaggtcggacggtaggaaggcaaggatgtgtacatcgaacgtaggtggctcgacagggcgtgatcgacgagggttggatagcgccataaaacgagcagagatgggcgctgagatgtgaacatggcgacgacaaggagaacgagaaggccatcagtcgcaagcaaagggcgagtccgagactcttcatctctgatcacctggctcacgatgtgccgagtggctcccgtcttcgctggcggcttcttcctcggtatcacgcttgccatcaatatcgtatttgacctgaagggcaaggcgaacaggccagtccagcgggttcgaagttcagattcagacaggagagacgggtaggcagggcccactctccttcttgacttgcatcttgatctcctctgcttgtttgtaaccttgtgcgatgacatggggcggcctcggtctcctcggacgattgccgagatcccatgaactggtaccaagaccccgttatctgagtggtacagtctaggtctgcgagtgtataagtggagcatgtggaaggggttccgatgtcgttgacttggtcaatacggaagatggtcctttccaacacataccgataatgctcgttgtattgcacgcatctctgctcgtagagtttctcgagtcgcatcgcttctcgtgcaggtttctttcagtaaaacagattaggccacaagacagaggtaattgttgggcggtgagcgattcgatctcatgaggtgttgtttggcggatctccagctggccttccgtagtcgtggtgtcgtgttgcgtttgtgtcagggcttccatcattcttgggaggatccggtcaacctttagccgggtgctgaccatgggtcacccaagacgacaaagcgagagatcgagatgatgataagtttgtctctcgattcgttcatgtgagtgactggacgagcgactcaccatcggtgcagagtttgtctgcaccggtgcggtacgctatgcatcggtgtggcctaacgatttttgaatcgtgacgccataaatcatagcatccaccgcccgattgtagtatccaccgcttggttgcagtatccgctgcttgattgcagtatccgtcacgcgaaatatagcgtgacgattcaataactcaccgtatctaacgcttacctacgctgtaatgacatccctcgtcgatcacccttcacttgtccggccgtcctctaggtcaatctagccgagtgtccccaatctacatttgactttcgccctctcctggtcgtcgtcccatccctctcacatcatatcgcagctcccgatgcctgtgcagccaggccccgcgccacgtcatcgatggcaatactggggcagaaggaaggaggaatgatatgaacagaggaagggtgccgaaaccaggatcatatacgtggtggagtaagaccgtaaaatgatactattctccacgtcacacagccgtgtacgctttctacggcgcaatgctgttctggaccagcaaacatgatgcctcgcattctgaacgactgatattagttggagattgatcgaaaagcgttcgcatcccatagagagcttttggccaggttccggtccggaagaagggggggagggggggggacagaaatcactagttggagccaagggtaacctttcctagctaagcgtggacaagccccgccctcaaaaaaaaatggaacgtgactacgtgaactgagatctgtaacctcgaatccatacccggtgacctctatgaaaagctcggacgtggagcccggaaccctttgcttgtctccccaatcgtggtctataccttggaaagaacagggaatcgcagcgttttccgtgatcctcatcgtccagatatcatagacttcgatttgtgtggatcgacgtggcaaacagcaactgagtcagttgactcgcagcgaagaaaatgcgtacggacatgaacaacaaatcactatccgccagcagacgaggccggcgctgcatcggcgttccacatctagtctgactgaattcgcatcgatatcgccttactttgagcgcccctaaaaaagctcttttcccatgcatgtgctgagacgacagtagtcaaccaggaagcgacaagttcaggcgatagcggctgaaaggctgctcatgctatccctgccgtacctagttgtgcatctagagataacctcgccggccgaaagatagtattgttattgcttacaacccggcaaccacgtgtggagcccccgaccaaagctgtaccgtgcggcgcgtttcgtttcgatgccaattctgaattggctattgcattcatgtcacacctttcttcttatctgtacagctcgcctttgcgaggcgttattcgatctcgggagaaggagagctatactagcctatccgtcataagccctcgttgatgatccgctcgaccaggcttgtagtcctggatctagacacatccggggcagacgtcgtctccaactgggtgggtaaatgttccggctcgaccgtgcccgaggtgatatcgctgaggggattgatggtgatcggtcgatcctggagcatgtcgtcatatgtgtaaaaggagattcgacggggttcctcttggtcctgaatcgagttgaatgcctgatgaggattgcccgatggctgagcgagaagaccagttaacatgaagtccgggtaaagacacgcgcatccgatctcacctcagtcttttcggcctcggcggccacgtcagtcccggtttccacgtcctttccactatcctgaactctctcagtctgcttgtcactcgaacccgccaacaacgcggtcggtctcggtccgatccactcgtcgatcttcttcttccactttcttccgcccgcatcttgctcctgctgagagctgctacctgggaacgctccggggatgagtacaccgagggagctctgcctggcctgcatcgcgggtcgcgttgcaagggtcttgtcgacggcatcaggggcaccatcgtcatttagcgaaaacacgcgaccgcctgcttcggtctcgggacgggtcgagaggaatgacctcttttccctggtcgggctaggcagcggggacgccgacctcgaacctgagcgccccgtcgaatccatccctgtccttccgaggtctttccaccgcatcgggctcgggctccgactacccccggccttgttgcccagagtcatcgcatttgacgcaccgaacggtgaacgattacccatctcccgactggcgatataggcattgacgggtgcctcgatctgtaatgcctgcgagcccgactgcgtcaacgcctcaatggcatcgtccagaacggtgggaacgtgtcgatcgctagagtcgtgcatgtgagggggcagagccgcagcgttgataaaggcctgaggcgagatgctcgacaccgacctggatgcggcgtcgttacctcttttaggggtaggggaacgaggcggggcagcggaggagctcctggaagctcgaccagaagcggacctttgcaaagctgttcccgctccgcctggtacagggctgttagcgaccgaaggttgggctccaggcaaggcgatggcgaaaggcgattcaatatctcgctcaaaaatggcactggccgagggcgagttgggcgtcgacatggacatgctcatcgacgccgcatggatatgggacatcgaggctcgcttttccagtcgcgacgagtccaagccggtcgcactcgcagagggagacatctgacccgtatgcttcgaagcggccggacccaagaactcttctccaacctcaccgagcgtcctcgcacccaggtcattcgagtggatgctgctggcactgggcgaatgcggcaacaaagttgaccctcggggtaagaggtccaggacgggactggtgctacgagtcttgccgggagatccgatatgcataggcatgggttctttgacaccatattcgtcgtcctcgtcgaccgcgctgacgcccgaacctgcacccgcaaggggatctgaccctctcatgccgtcctgcagaaccttcatctcgtgcttgagcgagtcgacattgagattcgagatggtgcccggggtgccatttccgttcccggcgttcgataggtttgctccgaaacttcctctagcgctgttggaaccgacgggcgtcctacttccaggcgtgatgacaccgatgaaatcgtccctgaccctgtggtgattgacaggctcgggcaccgtagcgggcgtggacgatcgtcgacttccgggaggcagcagggacgaattgtgagccgatagagcgggaggtggggccggcgaattggcacgggagtgcatgggagaagaacccggcgagaacgatctggctgcggacgaggtatggttgccctcgacgacctcgacaggactaccctgtctgccgatcaggtgttcctgctgcagtggggatgagatggcaggttcgttgttgttcccatgtccgggagtcgattgaaatcctcccaattgagatgtctttcgagtccgtcctggggagaggcccgacgatggagtcgttgtccctgaccctgtcccgctgctgttcagcccgatacccaacccaacgacccctgcgtgcgcatgatagtgacgatccgagtcagaggccgaagcgggaggtggaggaggttccctaggatcgagctgcgaaggatgatgcgggtgaagttgaggtgttaccgacatgatcgaaaccgactgcacgatcttgcgcagtcaactgaaggtggctgccggctgtatcgatccgacttgaaagctcgaatttgtttacacacggaccaagatgaatggctgggagcgtatgacgataatgccaacaaatgtagatactacttgcaacgagagctgctgacgacgtcgatcgccatgaggagttgcgacttggcagctcaggtgatcacaacgtcacactcaagtcggcggcggctaatcgaccccgataaggaaacgaattcacgtgacctgacctgacctgacctatctatcgcggcaagcttgaatcttaagagcgcacatgatgtcgggctaccttgcaattgacacgtagtaaacgggatgtcaagttgagaggctacagagctggcaaggcataggatgacatgctggtatcgggccaaacgaggtcctcatacagaaaccaatggctgggtcagggtcttcgaaggggatctgtggtttcggtgggatcacctgacggaaccctctggcctgacagaggttttacactgcttctgcatgatgtcgaagccatgaggggtggacgctgttcgttggtatgaatatcttattgcaaaattcagaaaatctactcaggcttgctgcaatgctgggcaacatagcgtgacgattcaaagtgatcaagtgacgatttgatgcttacctacgctgtcatcgcggtgacgatacgcgtcgcccaagacgccctatcccagacagcccgccattcacattataccgccacctgcctgaaaccgaaatcgagcgacatagtttctttcgacctggttggacgaacattctgacggatgcccagacaacctgtcttactcgccgtcgatttccgatcagataggcaaaaggggcaaatttggccagcggtcttgtacctggacttgcgcggtaacgttccgaatatcagatattccgcccagccttcccagctttcaggatccgccgcatcagtggcatatggctgcacgaaacatcgagccaacaataacggtaaggcgttcgaatcggcgagggattctcgtgatgtgatgcgatgttgacgagctgagatcgatattgaggtgatcttatctgtggggatgttgtaagctatactatcccgactagtttgcccattcgctggccgtctttccctctgatacaccttatcaaacgattaacgtgctgtgcaacaagaacacagatgtttactactagtagttcaccatacaaaccacctggagcgggatctttttggctacgatcgtgattcggcatcgtcttcgcgtttcaagttcggtcccgtcatcaggatttcccggcgttgagctatcgccggtctctgccaaaggtatccttgtgatgaccggccatctctcggctcgggggattgtctgtgaccagtgtccgtgcgccaaaggacccttcaaaggcagtcgccaggtggatcaaggtggttgggggacggggtgcttcgtccgtgactcggttacaagctaatgacagcgtcaaaacgcgtccacaagaggaacggcactacacgagggcatggggaactgatctatcaaaaggatctgctaccgttcgatggtctgatggagcctgacgtcccgaacgatgattatttgtctctgtcgtcgtcgtcgggatgggccgagtctgatcgtagaaggtggatcttcagcgtcgtcgtcgtcgtcgtcgtcgttgcccgtctacgacatccatttcgcatcttgtgacaacgtgactgcacacatcgtacggctttctcaattacaagtagcaccccgttatcatacctcgaaattcaatcataattcatgacaatccttccatgtcccggattgatggactacggcttctcacgagacgatcgatagccttgccgcgagactagcagcctatagtacgagcccgtaactcacgacatagatcacagtttcgatcagttcgagggacagacctggctctcaaccgctagcatgggcttcatccagcttccgacctcgcctctgtacgacaacaacaatctgacggacaaccttcttttcatgtttctcaaaacttccccacggacccttgtgactgccagcttgatcggctctgttctgcaagcgttcatatgcgggattctcacggtccaggtacgtctttgacccgtccctgatcgccgtcggtactgaatagcgaattccgtcgctccatagttcatcaagtatttacgcaagttttggaaggaagacaacctcacaggaaagattcagatcgtcaccctttacgtgctcgccctgcaagtagcatccttggttgtctgatccagatctgactcttacctatgccgtaacatcaacgaatccgcagcgcctcattcgccgtcctgcaaactcaaacatacaaggtcattctttacatcaatccttccaccggcgtcggcattcaacagctatttgaactcgactggaagctggtctatacggacgccttcttgctggcattcgcgcaggcggctagcttctggtatttctgttctaggtcctggaatgtaaggagatcatcatcgcagacgccccgatcctggtgaaccacttacggccgacttcgaatcttagttatgggacaggaacagggttttgggatcggtcatggttgtcgcgaattttctcgtcctcgctgtcggcctggtgtgagtcgaggggtaccgtctcgctgcaattcgagctaactgagtggcatctgtagcgctatttcggtcagtccagcgcgtcaccatcgatcccatcggctgactcttatcgacatcattgatcccgctgccatcagtattcttacgccgcgccacttgatttccgcagcggtagagaactagcaagtcgcgtaggttcagcccactaacgctattcaaacgctcatctcgcctttaactgcagaccatgccggagcttctcagactggtgcctgttctccagaagtatggagacacgacgttctcgattgtcatcgcttgggccatctctacgcttggtaaggccgtcgttccgagcaagtctagtcatgtgccacgctgaaacggacaggagcgtcctctgtctagtggtcgaggtctttactacactctcgttattgcttggcatctatcgacaccgtcgggctgctcacggcttcaagaacctgtatgacgcgctcggtagaggaatggtctacctcgtcgaggccatgtaagccttgtcgcggggtcgcgccgctgtgaggactcccgctgagagacccgctcgtcaggtgcttgccactcgctttgcagatcatgtttacggtcttcttcctgagacaccttggcatgggttcttggtaagctcgtattgattgtgttacccaatagaacgatcacggctgaaccttcgctttaggttgagagcttttgttcctttgcaatgtcccttgtacgcgttcgcggttgttcattcgatgctatcgtaagtgacacggtttcgaggcatatagcgaagcaacgttcgtctttccgatcctcaacgatgttacagtcggacgaaacttcgggagatgctcggcaacgagaacgttcatctttacaacagtgactctgatggaggtcagatcactcggcgccggtcgaccacgcgcgactcgcttcctgcagtctaccttcggaatcgcaacgagatctgcgaaagcatgggaccgtatgcttcgtctcgagacctagtcggcagacgtgcgcttagcgggacttatatggagcaccaaggattcttcttggatgagagcaaggatatgggagagtgcgaagatcccagtcttggacgattcaggcgcgtccgagaccccagtcaccccgactccatcatcgtccttatggacgaccttccccatctcggccagcgagagatctggagtccggggtctctatatcaactcggtagcccagtcgtctcacctacaagcggacatccgaaagatttcgacgccgacgacaagttgtctcacaagagttcgttggtgagttgcccaagacttacgtgtagcgcacacctagctcaatcggttcgacgtcggcttcagcgctccgggaaccacacgaaccccaacaggaccatgctcgaacgagtcgatgagcaagcactgtcctgttctgttatagacgtacatcaaacccctttgccggatctcaagtgatgcggcatatatgcaggatttccttgcgacctcgcgtgtcaatctcgcggccaaaaccagcacgaaaagcgatatctgattgccacgagcggcgattacagactagcgggaaaggagtatgccgattgtttgtatatcatagaatgtcccttcttcgttgaatatacatgatatgctcctgttctaaaaccttccgcggccgctgaagccgtgaggtccagggccaggaccgggacccatgagcatattaccaccaggtccagggggtggtcccttggggatgtttgctcgtgcgagtacgtccataaggtcttccggcttgaagatcgggcctgcatccagtttagaggtcagtgccgtcagctttctgttgtcgcatcgacagctccaactcgacctaccatcaaacagtcttggccgcggcagattacccataaaccagacgacagctctaggcaggcctgatgcgtctctctccagacccggaggtaacacaggtggctgcggcattgggggtacatctcgtcgaggtgccgacggaggcgagaaatctcttcgtctccggtcgtcttctgggggtcctggacgaccgccgttccgtcggggtggcgaaaatcctcgctgccgcttagggggtggttctcgaataggcggtccaggttgacgatcatcgcggtcccggaaccgaggttcaggtatccgtggcgatcgcattggcgagtcctccgttcggattcgtttcggcaagggagctgcaatagcttcccgcttgacaccgaaaccaagatcccggctggcgatttcatcgatcccgttgtatacgaagcgcgatgcgaaacgtctcaggggggcgtctgagtctccactctcggtcagcatggtatcgaaaaccggtcatccggcaaatgatgacacaccgtttggataagcctccttcatacgagcttcgagcttgcgggatgctgccaggtcaccatagaggtattcatgttttgaccaagcatcccaaatcggtcgtgccttgtccgcggggaattttaataccagtcgctcaaacaaagcgcgagcgtctgcgaaatgatcgattcagtcaacaagaacaatttgcaaagcggcgatgactcggcgactaactgctgtcatcgttgatctggataaggaattccaagaatttgacggcgaaagatacgtcctcagggaaggcttttagtccgagttcaaagatcttggtagcgatgttggagtcagtattacagtggtactccatttgtgctgtgagcatcgttgttaatcaacctgactctggtgcaacacgatacgccgacgtacctgatgactcgtacacgtgccatgatacgtatggtgatttgcgggcagcggagaacacgcctcgagccgatctcaagccctgtatggttgactattcagcgggaagagcgacgcaggtaatgcgatatcggacccacctctgtccgtctcgcgaacctcatgtacatgatccagatgacaccagccgccgtgacgaggtcgtccagctccttctgacgcctgtcgaccacggccttgcctcgcgcttccctttccatttttcgcttctgcgtttcggacaactcggctccatccatatcttcatcgtctgctcgcaggaattcgacctcgtcatcctcgatttccggtccctttgcctcgtcgacctcttcgttgatcgattttttcagcttgtcgatctcggctccgtgattcttgatcaagtcttcgtatgcagtacgggccaccgccttgttttgtcgaatctcctcttgctcagccagagcaaaggtcagcaaaaagctgttcaattcgacgagaatgagctatcgtctggcgtggacgggcgttcgaaagttgtagagacgcgaacctggacgaattggcctcgagaccggtcttgaggtaagccatgacctcgtcgagcttctcctgaccttcatagaaaactgcagcctggtgcctgcaccgaggtacgagcacgaaaagtcatcaggaaacgatgccacgaccaagaccacctcatcttagccacctaccacagctcggggaagaacctcatctgcgtcaggcacttgcgcagcgcatacccgacccgagcttgcaacgctgcgggctcttcaatgtcaagaggattgctctcctcccacttgaggtactttttccagttgatgaccaacgctcgatcggcctctgagcgcgtcggtctcggtgggatcggcatggcaaccagaggttctgtctgagttttcagatcccgcaagacggttcgagcggtcatgtagagcggggaacgctcggcaaggaatttcttggcctatatggacgaagagtgcacgttggaccacgagatggattgtgcgtgtgaaagacaaggaaaagggttttgagcgatggcggtttggcaaaacgatcgatcgaaagaaggttttgttttcgtttttgtgagggtcgatttgcgtgttcgcaagtgtcatgccaattgcaattcatcgggcaaattacacagaccagcaaggttccgatgacgattacgcaaggagcccatcgtatgcacgcagcaggaccgtatgtcgccaagaggtagggatagagtgcgatcattttgacccgtgagcatcgtcccacacgaccgcaacaagacccactcaccgtcatcttgttcaacttgttctcgaacccgtcgtattccctccagatctgctccacgtcaagcagaggaatcgctacagcccgatgataaacctttcggatcgcgtcggtctgcgtctgagcctcccacgtattggtgcactgcagctcaaaaaacatgctcgccgatcagttcctcactttcttgacgagttgcctgccgcgacaacaacgcctgctgcaaccaagtggtccctgacctacttctttttctccgaggaacgcgatatactctctccagacatgtcccgccgccatgtccatgccggcctctttgagcgcgagttcgtaggctttgacaaccgtctccctgaccgcgtccgccgaactggcattggccgtacccggcgcaggtatgggattttgtctacggatgtaatgtaggtacgagcctgtaggaccgggtgcacagtgatgaccagagccatttgagtctcacaggacggagagctcggtgaatacacggtgcggactcacgccagatgtctaccccagggacggcgcccacgctgcctcccagccctcgaagcgccttttcgtacagtgcaaccacttgcggaaagtttccatgggcgagctcaaagttgatcatgtctagcatcggaccgacctatattgcccgatcatgattcgcgcatacatcagtcccgctgcacgttcgtacgcaaaagctcgatcgctcccccgtgatgagacttaccgcggtggggttatctttcgagaacgcttgataccacgcccgcgcaccctcgacatcgccgtctgatttggccgcttcaaagagtgccaacgacgcctgcgcattagccgccaagttgtccttgcctgcagtacccccccgggtggatcgatcggacggtagtgtgggttagcgataccctcccctactatacgcccaagccaaacggggcactcactctcggcccagctggatgctagagcgtggtgcgaagcgacgctcggactggtcacctggatcccttccgggaactctactccctcgaaactgaacctcggcgcgtaatgccgaggttcgttcctcctccccggtgcgaaacccgaagaggaggctgtaggttgaccaggcggggtaggaccagatgtgggtttgactggtaagcccgctcggggaccgggcgggaggatgctgttacccggtgcggtattggtaggggcggtgatggcggtgggtgcggcgtcgagggagtaggacggagaacgacgttgctgtcctggtcgacgacgggtaggcgcaggtcgaacaggggaagccgaacggtcgtcccgtcgtctctgctcgacctggacattgcccgtcgagaaagctgccacaggggtgggagtcggtgtgggattgggttcaacctgtagtgtcggcacagcaggtgtgcttgtcggctccttggcggtcgcctgcatctccatcagactcggatcaatgttgctatcgatatcctgaccctgtcgaggttcctccatctcgtcatcttcgtccccaagatccatatcaatctctccctctgcgtcggcgtccgcatcctcggtcgatccttcgccgacctgggacgtgtattgctgaccgatcatctccatagactccgccgtcgtctctgtcgatacgtccgcactgggcaactgcgcgatctcttgctccagctcggcttcgtgtgccgtcgcatcgtgaaagacctgatcctcttgttccgaggaagcctgtcctcccatctgatgatccgtcgatagagatgcaccggtttccaacccgatcactgccacggcagcctcgtccaacccggtttcgatctgatcgatgtgttcgaggttgtcgatagcatcctgtacgtccgcttgaagttcggtcgtctcctcgtccgaaagctcttgaaaggctggccccgatggcgagtatcgaccactgtccatgatcgtatgctcgtccgtgtatacgttttccagcaatgtgattgtgctgatcgattgctaatggttgtagggtgtattacctaggtcacttctgtaccacgcacgataaagggcgggaatccaccatgatgtgaagctgaatcattttttgcataacctgagtgataagattaacacgtcatctgatgcgaaactgatgtagtcgttcactgggctgaccgaacgatcgattaatttgataacaagttggaccagcccgactgttcggaagcaaaccctctcggagcgagtcgtgaggtcattcactgcactttcgagatcatcaacacacaaacacacaaaccgaactgtgttcaaaagtgaccttgcctgacgcaacgatcaccgtatagtcgcaacatacgaaacgatcctctcataatcatgctccgtcgacgtctctcttcgggtcttctccgagctcagcttatccagcaacccaccaacggcgctcgtaccgtcatccccgccgttcccgccctcccagccaggtatgccacctcgaaccgtggactcgcctcggccgtcctcctcagcagcagggaaaactgggcgagcaagacggtcaagaacttgaaggaagcgctcgctcaacgaggtctcagccagtgagtgaggcagtgtgaactctcgtccgtcagcgcgatagggtcaaggcgaggaccttgcctcgggaacgtcgcgtttaatcgggcgaaagtgggattacgaatgtgaacgtcgattgacatgaaactttcttctcgactgtttctctcaccaggactggcaagaaatccaacctcgtcgaacgtctgaaggaatacgagactgcccaatcctccagctccgcgtcccgaggaatttcctcctcggccatcgccttcaactcgtcctcgtctaccaagaccgaggatcagaccccggtccctgaagctcccaaggtcgaggtcgccagcggagtcgaggccaatgtcaatgtgatccccgagattgagattcccgaggtcgagcccgccctcgctcccggattgccagaggccaagaccgacttgcaggaagctccccctacgctcgacatcaagatgcccgagttcgaggaccacgtcgaggcggacgccatccctgtgagcttgcatttctctgacgtcctggggtgcacgcgcgcttatatacctttgctatgcgtcttgtcgctccagccctttgaccctcacaactttgagagcaaggccgaagactcgctctctccccccgccgagatcgaatcctccgcacccaaggtcatgaccgtcgacccatcccaggacacccgtcattcgctgcacgagaccgtctctgccgattccatcgacgtggccaacgccgagacggtcgtcgagacctcgaaagacgtcgtcgacgcactaccccccctctcgtccatcctcggctcggtctccttgccctcgctcggtgggctgggtgaacggttgaacgaaatcgtcaagcttcccgaggacgccaaggattcggggaaacccttcgaggtcatcgaccgggggttgaactcggaggaaaagacgggagcttacatcttgctcgggaccatcgttgctgggttgttgctcgggggtggcaagaagaaggagaccgaggacaaggacgtcaaagagcaggtcaacgaggccgcgagcgctgctgctcattaagccctgttcggcctcctcgggagaagcacagcgggcgggacggcctcggaggaacggaaaagagagtagaagaaaggttgtagacgcgagcatacccccccaccaaagttggtctaccttgctactcgctcgtcagggtccgtcgggttccgctatacattcatgaaacgctgcagatcggtcgtgcactcgtattcatgatagtcgctacgatgtctcgcgaggaacgttgggcaatattcgtttccacgttgaatgcatcgcgtcgaaattccttggttggactgatgatatttccgaaccggaagtgcttggatcatccgtcagatcacccgagtagctcgcgtcttcacgaggcgaaatcggatctcgagacctgacctggtgggataccaaggtcattcctgagatcttgagcgcagaccgcacgtaatccgtagtagcctcgacgcgggtgggacaatgatattacggtacacattacatactcgaatacaagaaagagaaaggactgtatatactgtaccattatctagcagtgcgagctagcaatcacctttatccacgtggtcggtcgccttacattgcctcgatcagcttggcgagtgccaacgcctcgctcttgtagtcgattgggatcgcccgtcgaatactatatcgcacacgggtttggtcctatccggggcgaggcctatccgtcagcaactctgatcatgcgatgtggcactcgcaacggcgcggctcacgttgaaagtgtcttgtcgagccgaacagctaaacgtcaaagacctcgcctgagccttggtgaacgcggcggaaaatgcggcctcgtcttggtcctgcgacacgaggaaaagccataagctttcggtgtcgatgatatcgtcagattcggcttctctcgactgaccttcaactcgatcaactcgttggcagtcttgccgagcaactgctctccgacctcgttgaacgccgtcacccagatgtgtcccgagtgatccatgatactcaagctcaagatgtacctacggaagagcatcaccatatcagctcaatatctagcgtcgagcctcattcgacatcctcgcgccactcaccgatgcaaaggcgctggatatgttcgatcacacttttcacatctccatccatcgctctcttccaggacctttttgttgcacccctcggccggacaagccgggtaactaaacgtctcgtgcttgacaaagttgatggtcgctcgggtggaaaagtactcggtcttgtccgacgtgccgatattgtcgtccttgacctgaccaatcgtcttgatctcgtcaggtcggatcgcttgtccaccggcagctccgcctcccatcccagagttcgagtaggtctggtactggacgctgttgccctcggcatcgaacctgcggaggcgcggtggtgagcatctatggaacggctcttgattgagagcgtctgtcacttaccatcccttcaaagcatgggcttgctcgatgtcggggtgaatcgacattgtgctcgagctgaacatggacaatgatcgtcctgtttaaacgtccccgttcaaaacgatcagccaaaccgtctctcggtggatggacgggagcgggcaaagggactcgcctccgaaatcgccgaccttgactcccttggcagcgatgaccggttggtcgtcgcccttgaagttttccgcttgtttaccccacaaggtcaatcggatgctatgctgagactgatccaccagggtcaaatctcgtttggcaaactgtcggttagcaataccgtcgcatgtcagcctatcgagccgggtctccatgaaggtagcagacagatggggactgaccggtttttgagtcgctttcgacgtgatcgaaccgagttctccgacctctttgaccacagcaagcagatctgtatgcgcaacgtgtgccccgtgtgatcagctctgcacgagtcactgctctccgggtcgccaagccgagtgctcaccgacggtctggtccttttcgacattggcgatttccgaaatgggcacaaacttgtattgaacttgcggcacgttatcatcatcgcactgcgattcatcccatcagtccccctcgctcatccctttccgctggtcgaacgcgcttcgggggactcacgggctcgatctcggtctggttctcgaacatgatctcgtactcgttgttgatgttgctgaattgcttcttggcaatattgaccctggcgcgtgagacgtagtaaactttgccttcttgaagcttttcgtagaaattgtccacggcctcgttgaaccccgtggccttgatctcggcctggacgacggacgatgcgtgagtgaccaagtcgaaacgtgcaaaccttggggcttgactcacggtctcgtccatcagggtaacgctaaagagtttcccctctccacgttgattcgaccagtgcttgatgtccgatttctgcgtcactcgagccttgatcgtccacctggataaggtcaaagccggtgaggaccacgtcaatatccccgacccccacgtggttctcaacccgtcctatcctcacgacgccgactcacttgttctgataaggactcaacccttcgataggatacagcggtcccatcggtgcgcctcctttcgaccctggtccacctgccgcacctcctcgtccagcggctccaccccgtccaccacgagcccccaccgcacctcctctcgcagggttcgtctggacgggcttgttctcctggacggcgggtttgacgttgttctccgtctttgaggcgctacccccggggccggcggcgttgttggctccggcgcctgcgttgggtgcgccgatgttatcgatggcggaagggttgccatacttttgatctacttgagcttgaacgacctcggcggcgaggaggatcaagagtctgggccggggaagaacgtatacggtcagccgggctgtcatgcagaaaagttgcaaacaggcactggtccaggctcaccttcgaccttgcacatagttcatcgaatacccggtgagcttgatgaggctattcttgtcgatctgtttcgactcgatgagggggttgagttgggtggcgagcatggattgaaggtaatgttggccgtcagagaggatgaccctgtgtgttcgaggataccggcgggaacgtcagttccatgccaatccgtctaagaccgttcatgagaattctatgtgtgaggctcatctgacgtacctgtatcgctcggtagtgttaccagccggggtctggatcctctttacgctcaaggcctgcaaggtgggttgaaagactccgcattccggggcggggtcactgtagtagaggtcgtggacggctccttgtgagatctgatctgccatcgtgggagtatagtgtgagctgtgtgtttaggtcgaaacgaggctagaaaaatgtggtggccttggcaatctggctgtggtagtggtgatgatgatgattaaagtgtatgtgtgtgtgtgtgtataatcgagagcaacgaggtcgaggtcgatggaatcgcttcgctgcgcgtcgtggtccaaaggaaaggagagcgagcgcgtttggatcttgatctttcccagtcgcgtcatctattttacacccatccaaccgcccgccaaaaatggatattcactttcaacacagtcacgaactgtcgtaactcactgccgtaactcactgccgtaatcatacatgcttccaggaattccaggctcggtcggcggtgaccgaacctggattcaagagcgcgagagcttcactcgctcgtcgtcgtctattcttcgacctgttcttgttgtcttgatcttgctggtcctagcatgagcatcgagtctgtcgtaaactatagttctgcaagataatcatactggatcactggaacacttcgacttcgtatcaaagccctcctgaacgatgtccgtggtagagacgaaaagggggcctgaccttcagctcaatcgaccacgacgggtgatcccccaaccccgagcatcatcctggcggaccttcttccgactttccctactgctcgccctcgtcacctgcatcgctcaaacctcgatacctcgtccagatatcagtcaatggctgggcatcacctcgccagacgtcctcatcctgacggctcatccagacgacgagtgcatgttcttcgcacccgtcatactcgccctcatcgaacgaggtatcccagtcagagcgttgagcttatccacgggtgagttcggtccgcgtcttttttctttcacggatcctgtaaatctgaccttgacctcatgcacgtttgagtgaaacaggtaactctgccggtctcggtcaggtccgacgaaaagaaatgttcgagagctactctgtcctaggcctcgaatcgcactcggtccaagccatcgatcacgagtaaatcacccccgtcctacgtctgccatatcgcaacgatccgaacacagagcgctgaaatccgtcgtcatctgtgcgtgactggcatagcgaattacaagacggtatggaccatcactgggaccccgctcgaatcgcagacgtcttgcgcaattaccccaacatctcgagcatcaataccgtgggtcagacttgacatgctgttgccgaattgcgagggagggtcctcaagactgacccttcgatacctctcttcttcttttttggcatcgacagatcatcacgtttgacgctggtgggatcacgcaacacccgaaccatacgcccctgggtgctggagttcgatctctggatctacacccgatccgattggttctcctcgagagcgtccccaaatacgtcaaattcaccggacctctctacccgttgacgctcaagacggctcgtctcttgtcagaggtgcccgtattagccggtctattcgaccggggtaaagggttgacgatcacctcgacggcaaaggggtacgggacggctttggaggccatgatgaagcacgagtctcagttggtctggttccggtggttgtatgtgggagcgtccaagtacatgtggtccaataccctcgtactcgcggatccgagatgaagctctggcccgttcggaaagagcgatactggctcggcaagggttcgttatggcatctaatataccccgggatacatggaaagggatgttttcgtggaagagttcgtaacaatcatcgtaaaagagaatcgacggccggggctcagatgatctcgtggacgatctgattcgcggccgtctcctgttggcgttcttccgcccttgcatagtgccgattgacctttttctgaaacacaggattgggctgcaccatgtgaagacaagcccggacgaggcagtaagcgatggcgtgagtatacaaaagtcgctgcacgcgcgttgatgccacacgtacggcaatatcggccagcttgatctggttggtgcaaccagtgacggggcacttggccgccttgtctgcatctctgaggttccccgggaccgccttgatatgctgcttgatggcgtcgccttcgaaggtgtgtttgcatactcgactgtaaacgacatccggttgcaagcgtgaacggtgacacttgcggaaacatttgttccgaggggaccgaccttgtataggcatccacgaagggcaggagggtaaacggacaagtataagtcagcgtcaccccacccgtctcgatgtccgagtcgtcctcgtcgttgcctttaagggggagggagagatgagccgcgttcagtgtgttcctatttgcaagatgccccggctataaactcacgtttttcaagtacgtccgacatcaacggctgagctgaaccgtggttattgacttcatgggttgattcgcggaattcttggtacacctcgttgtccttgactgtggacaacacgaccagctcgtgtttcagcactcagtagagaacgaccatgccggatcgtaatgttggagagaaggacacgaagcgaggcagacttacacctagcccattcggatttagccgagtacacttctcgacgccgctctacttcgtctcggtaatacccttttatatcgttctgttaaagagcatcctcgatcatgagccacaagctaccctcctgattagaagggttgaaacttacaatctgaccatcagctttcaatttctcgttgatcagattcaacacgtctttctcgatctgtagccggttgatacggtccagactgttcttaagttgagtgtccgtcttgtcaaacatctgtattcaaggtttctactgagtggccgatttgatttatccctctcgtaaatcctacccacgtcctgactctgttgatcatctttagacggccgagcctcttctatagcgacccctacttcgatcagggtccttgcatgaaggtccaaggttttgatggcgacatcgatttgacttttttgcgtatcgagctgtcaagggttactttaggcaactcttgtttcgaaatgtacggatcaccacgttacggcttacggttctagtagcgacagagccgttaaggacaggtttatcttcaaacgtgtctatcgtccagccctctagctcattaggctcttctggctccgagtttagctcagcctcctcgtctacagtcgggcgctcttcttcaaagtcttcggggttgaggttgatcctcttggacctgcttggaccggcctgcgtctgatcgtcttcatcagcggattccacgacccgtgatggcttgcgggaaccgtgcccggcaggctcttgcgtggcggcagctaggagatcggccatggcgtctcgtcaagacttcctgatatgctcctgcgagtctttgaatcggacagatcgatgtctagaatgggtcgaccaggaagatgatgatgatgatgagatgatgatgatcaaagtcgcttgtcgctttatctgatacacgcaagcctcaaaagtggaggtcgccgccgctcggccggccgatcggtcatcctcaatcgatattttattgccagtcatcggcatcttcaggttgcagtcgcacgcagcttttgacgaaggccatcccacgattctcaattggctcagccattgaactataggtctccgcgattgatctgccgagactgtttcccgccacatcaacccgatggtcaacgagcactctcaatggcatgccgacctgcctaccgaacacagcgacgaggaagtgttgaacccggaaaaggtgctcgtccttttcgcatcagagacagggaatgctcaagataccgccgaaagagtgggacgggagatccgaaggcgaggagggcgatgtacagtacaaagtatggaggactttgacatagtgcgtaatctcgacctgatgactttacgattacgaaccgagctcattgagccagctcgccttagtcggaattaccgcatgtccccttgttgatcttgatcacatcgacccatggtagaggccatccaccaccagccatgctgcccctctggactgctcttcttcgaagcggtctcccggaccatattcttgaaggtgagtactggtggtatcttcgggttgaccggcttacccgctaacccgtggaacatggcagatgtgaactttgctctctacggtctaggagattcctcgtacgaaaagttttgctacgccggcaagatccttgctagacgcatgcttagtctcggggcacagctgttaggaagtgaggatgacgatgacgaagacagaccgcaaacggaagctatcgtcaaggagatgcggcaattgggcgtgaccaacaacacagatagcaatacgatggaagacgaagagaagcagcacggttgtctggcatggggtgacgagcgggcacctgacgggtaggcgatgatcttgacacacacttcggcaagctgagtgactgacccgggccatacaattgcagcctagaggagacctttctaccctggttgaaacggacggtggacactatcctgccttacctgcctcttccaccatcaccatcaccctttaaagagtacgcagtaacggacgtcccgccgccgttgtacgagatccggttcgtcaaccaagaaacccagggctcaattgcacgggcggaatttgacgacgaagtggacgcactcgagtctgggtgggagtgggcaaccttgaagaggaacacaagggcgactgcgagcgactggttccaggatgtgcgagagatcgacatgaaattggaatcgaaaactgagtgagcggcacaaccaagcctcgccggactagcgctcatcaatgccgtttctcagctatgcgcctggttcgatttgctccttgcgaccagagacttcgccagaggaggtggacacctttctcaaactcaacaagctggaggatgaagcagatcgacccatgattatcgataccctgaacgacggtacgcttccgattattcaggcgttgaccgatcgatagctgaacttttcctggatcatagaccaaccgctaccacgacatctccctaggcggaccgttacaacgttgaggagggttttgcagcgacatctcgacctccgagcgcctcctcgaaaatccttctttgaatggcttcgcaggttcagtaaagaagagatggagatagaacggctggacgagtttgtcgcagacccagtaagtgaaacggaggcatggacatggcagaataaattgatgattaactctggcgactcaggacgaaatccacgaatatgccacccgatcacggcggagcgtcctggaaacaatggcggatttccgcaacgtcaacatacctctgagtcacgttttggaagtcttggcgcccttacgaagaaggcaattctcgatagcttccagctcaaaggtatgattatacgtcattcggttgtagcgtgtcttcgactgacgtcactgcttgcaggctcatcctggcgaagtccagctgctggtagctcttgtagattacaagaccaatctgaaaatccggaggcgtggacttttgtcttcctggctacgagatctcgaacccgatgcgcgaatacctcttcgtttagagccaccgacgctcttcctgccagacataacgaatacgcctgtcatcctggttggaccggggactggcgtcgcgccgatgcgagcctttgttgaggagcgcatagctgggggcgaagcgaaaagtaggtctacggcgattcgcgaaatacgatgatcgactcccgattaagatgcttctggcgcctctagacaccgctctctactttggctgcaggagcaaagaccaggacatgtactttgccgaggagatggagacctggaagaagcacggtgtgcacgtgcgggttgcgtgctcgcgagatcaggttcgtcccccgccgccgaaagagcaaaaggtgattgaacgaatacgctcaacattgctactgcgatcctcaggaaaacaagatctacgtgcagactctaatcaaggaggattcggagctgataagaaattggatagtcaagcgaaatggcaatgtctacatatcagggcaagttccggctgtgcttgtctaagtgagcttgtctaacgacaatttgaatcagctcgtcgaatgcgatgccgaaagcagtccggaaagccatcgctgattcgatcgagggtatgcaagacatgggaatcaacagcgcagaagacgctcagcgctatgttgaagacatgtttgagagcggcaagagaggaggcgaagagagctggtgaattagatgcgctccaatgcacaatgcaatgatcatcgccatgctcgagatgccctagtcggactttttacaacgtgatgcgcagattccgacttgcgactagactttcctggtccgcgtgagattccacatcagaatccccgtataccgagcactttgcgaacatcgctcgtgaaacgcaaactgtctaatacgggcagtgcgtctagcaaggctttgtcgttgggatcggacgtccaaccttcaactggaagagcgttcgctgtggggtcaagcgatacaatcaacatctaaccgttaagtcgaaaaccgttcgtgcaatatcatcacatacccttgttccaattgtagctaacaggcgaattatccatgaagcacaccctgctcaagtctggttctacaagcgtgagatccttgatgtacgaaccattggcctgaagcgagcatgactggcgcacgtgggaagatatcgtcaagttgctgttgacgactggacgtcttttcacacaacggtcacttacgtctcggtaaagtttcttgccgaaaagacctctgcctccatcaagccaatctatgacaggatccgcatattcctgcatcgatgcagtgaaaatgaccaaggtgtaccaagaagagacctggttgagcgggagcatcagtttccgccgcatccaagctgttctttgtcagacttaccttttttaggaaatgatctacaaacggcctcttgtagacgtggtacagcgtacttcttccgccaaggaccacttcaacagtatgaccttcgccccgagctccacctccgcccctacgctggctaccgaaaagtccagacaggttgatccctactagaccgctaccgccacctacaccactcgactggatagtcatggctctggatgtcgaatgtatcaaggtctcgtccaggtccaggatcagcgtttttggcaggtggaagggggtcatcaaaggggcgcgtggtatggagatgggccgattcgggtacgggttggccgtaaggacctttggttgcgagatatccacttgtccctttcctcgggttgttaagagtgtgggcgcaagcggattcggcaagagtttggttcggcgtgatgaggacgtggtagcgtcgacagtaacatcatccgttggcgttggatttgtcaaaatgctgatagtgactcctcccgctccactttcatgtctttgcagagcgtgggcttcgcctcgagaagacgagcgcagccggaacgataccgcatccggtagtgaccgctctcgagacacgctttccgccctttctcttgcctggaccggcggcggtacgtccgcagttgccgcctgctctgatagctcttcatcggtaccgggagccctagtgacagggtccacccagtctgacgtgacttccaagccgtcctcggcgttcttgtcgctcatctcgctttctgatcctgaaccctctctcaagtccttttggatttcagcattgtcatcttcaaccccgacgtcttgcttggtttccattgcagagtctggctgcatgtttctgacctccttgaggaacctctcggtatcgccaaacacggtgctccacagagagacccaaagagccaggacggctacataagcaccccctagccagccctcagagctgggtagcctccttcgcttctttcgccgtttttcagcatctgtcgagataatcccagacttccgtcgtctctttcgtttctgggagccattaggcgaggttgggggcagaggtgtggccctccgcctcagacggcctctagcctggttggctaatgacgagtcggaatccaccggtacagccgggaccggaaccgtcacattgagaatgctctctggaacttcgggagcttcacgtaggcggacattactcctgactggtgtgctaacggcggaaggaggtcgcggattgggtgagcgagagagataggtatccagggatttgagcgcgttcatggtgttccgtgatcgcaatagtaaaagacgtcgtttctattcatgaaggtcgtcgttcgaacggttccgatccgcagagtatgtcgagcgtctgagcgacaatcaaaggcggataatggagacttgttggtcttattaggccatgacgagttggatggccatctttgtcgatagagtgctagcatataggcggctacaacgtgactgtactgtggggaagggagtttggggaagcaagctcggcgttctcaatcatgttttaagcttatatattcaataaaacagatttcttaacgtcaatgtcgtactagtatagtggttagtacttctcgttgtggattccgtgactcgaacctgagttaaccgcatatccgagaggacccatgttcgattcatgggtacgacatcactttttagcgttttgcgccagtcgaacctacggcaccaatagaccttcgtggtaccttcccgacccgatacgatccttttctacacttttggctattttatttgcaaagttattgccattttgaacgcggggatcttgtgaacatgtaacgcaacttgcttcgcgcgcttcgatctaaccttcggtcattccgccactcagacgcggcctgcggcatagttgagaaccgcgttctctgtctcggaaaagggaaggttccatgaaggcgaccgaagatggttatccgtgaagatcttgcaacatcggtgtttcttacggatgtgataatctctgtagattcgcgccgcacccagaaaagcgcggtgaaggccagatccccgtcttagtgagaggcgcaacaagatccatgctcaacatggtcgcattgccaccttggcatgaatcgagcttgaccgcgggcttgtgtaattatgcccctacgtacggtaatctatgatggccctgggatcttgtgaacagcgcggtgatcaggcctctactctcgagacctttgggatgatgatgctggcgtttgcagctcctttgcatactcacccagcctcgtagaacttccatctccgatcggtgctgcactttgaagcggcattaccggaccttctcgcccactgatttgcttaacctccatttcgtgttatgggaagcttcacaattgccaaagggtgacgctctggatgcctgacttgccaaggcgcggattagttcgagccgcagctatcattccccctgaagcccgacccgatcacgttgtttcgagctgaccaagaagatgaagatcaagacgatgaacgttcggatggagcatcaaaacgtgagtcgttaaaaacaggttcctcagacggtccgtcgctcggtactcgggccattaatccatctcaatgagtcgcgacgtcaacatccttaggatacgtcgcacttgatcgaccacctgaagtcaacgagtatgaagactgtccggtcgacagcgacaaggccgtcgagcctcgccgagaggcacgaatcaaatccgacggaaccaagaccaccgttgttcacatacctcatacactggcggacatcgtgaaggaggcaacgtcgaagaccttgtcaggcagcccgactatttgggactggaggtgatgaccggcgacgtcctgttccttacgtctgacggctatactcttgccgacaagaagaccgccattgtcgacacaatatccaccattgccttgagctatcaagacatgaggagggtttttgcgaacaaaaggggggccggggtgagttgctgttccttgtcagtctgaaattctcctgatgtccggcttgcttcccaggttcgagtcgaaaccaccgcccttccgcttcccgaggatctcatcgatacaagactctatcttccctctcgacgtgggggtttccacttctgctatcggacatctttgggacagaagcctgagagtgagtcgcgcaggtatggcatcagacattacatgccgcgctgacttgcgacaatgttttacagccatctgtctatcttccgacatgacttctggttgctacaaagccgacgctgtttggcgatttctggaggagtgttggggatttcagcaacaagccaccgatattattcgttctattgacccagaactagctcggcaaagtcaagagtccattgacaaagtcagacggtggagcagggcgttccacatctttggtcctaccctcttccttggcatggctgtgcttcacaacgtacaggtcaggcgtcacttggatcccggtgacaacaagatcaaagtcatgacaataaatctgttcaaaacatatgcaacagacgcatgtctggcggtcatattttccgacgggactgagggttagagtctgctccacggactataatcgtgttgaatataaaagagtgttaataaatgtcattacaagaagcgatagagagatcgtcaagacggaacggatcggaaggaacgagcgatatctacgttaagagtcaacgggaaaggacgacatgagaaatgtctctcgttacatccgagagtgggtgcaattccgctggatcacatggtgacacagccagacttctttgcctttgtcgttcgtcgattaggagtaactgtataaacccgttgaagctctgagtctgcctggcatctccgagagatgggcgaggtttgtacttacggacaacacggatggcctcatcgaagacggccttgagaccgagttgcgtcaaggcggaacattccaggtactgcatagccagcgcaacgacaagtcaaacgacatccaggggaaagggtagagctgcttttttgctcaccttggcagcgttgatctggttggccatgctgactccctttgcacggccagacctaacaatcagcaccattcggataccgtaaccctacacttgtctgtattcccggcaacgagacgcacctgactgtactcgatgggctgctgcttcctatccctcatcttctctaaagtctgcgggtctttcctcatgtccagcttggtaccgacgaggatcttgggcgtgtgggggcaatgatgcgaaatcctgatagagataggccggcgggtagtcagtatccccgcttaacttgcgagtcgagtcgagctgtcactcggctgtggtgggactcactctgccaaccacttggtcttgacgttctcaaagctcgcagggctgacgacggagaagcagacgaggaatatgtctgtctgagggtaagagagcggacggagtcgactgtgagcggtgacgacacgcggatgacatcagttgatagcttcgacagggtggaacgtgtcggtcaaaggggtactgactcgtaatcttcttgaccagcggtatcccaaagtccaaggttgacggtcgtcccgtcaaccatgacctggcgagccactcatatcagcgagcttgctcttgattcagtctagatcagaaggcagacggactcacttgggcagagtaattgtcgaacacggtgggaacgtattctccggggaaagcgttggtcgtatatgatatcaagaggcaggtctatgttgatggcaggtccgggacggaatttcaaggagtatgcagatcagccgacgtcgatgtggtccctgctgattcaaaagatcggacccaccttgccgacagctccgtctcctaccaccacacctgtgactcgatagcagcagatagaggtaaagcgatcagaagggtgatgacgtccgggtcggggcacgagccactcacacttgatgcttcgaggaggttgagccatgttcgtaaaatcggatctgctataagagtttgttcgagcttcgttggatgggtgctcgatcaaaatcaagaagagatggtcgaggtggttgatcgtgaatatataggcgtagatctgtactttgctggcctattaaaggaggctcgatgggtcgtgtaggtcgtgccaagagtgatcgtaggtagttgagcggtcacaccggtacaggtcggaaaggtggatgtgtcgttcgaacgggtcgtgaaaaggcgtgatggaagtcccagaaatccggttcggtttcgtgaaatggctctgggggtcgagctcgtttagactcgtcgttggctttggtatgcaatctgggagtatatgtgccgtgtgtgtgtgagatgtatatacgatggaatcgttcacatgggtgactccgttgtatggtgatcaaaagggtcaccttggggggggggttgagggttgggaatggtcgatttgatgagaacgcaactgatggggcaagcgagtctttctcatcaaactccctcttgtcccgactcacccatccatcacgtcactcactctgtctagcctcgtcggctcagcccgaatcacctacctcccgataattcaaagatcacaagccatagggtggcacattcactctacgccagcgcctctgacatgaagctgccatcgtgaacctgtgggatgtcccagatggactactaacgacgcccctaatcccagtcccgttcacacctctcgctaaccaaaggtcgagcctgtcgactgatgatcgccgaagcacagactcgacgcgcgccagcgggaataggccccggtcggaacgcatcggctgtcataaaagttgattgtacatggaggcagactgctcgtcggcagtcactaaaatgcaataaaggtccatcagacccaggtaaaaggcagccggtagctgacacggtccgctcttctatcgctcccttgcttcgtctagttgggtatacacgacgattgatcggcagaaacggtatatccttgcgagcaagtatctaaattccagccatgagtgcgattcagcccggtcattccgcttccgaaaagccttgtgaccatcatttctccgtgcttaccgatcacgcatcgaccggtcgtgcaagagactccgaaagcatcgacaccgggaatctcgaggcagttgataccgtctccgggcacggaagcgcatcctccacacgattcctatgggttcagttattagctctggccggtcgggacgacgaaaagctcctcttgtagcttacgagttcctgttgagtgtcgatgcactcccaaccgaccttcttcaagacagctatcctcccaatcacaggatccctccgatcagacaccctcctctgccgattcagtctctcgggactcaccagcgttctcggccaggtcgatcctgtagggccagcctccgataggacaagccttctcgctaggcctcgaacagagcgtatcccgcttttcggcgagtcgacgtcgtcgagcttggtgcaccgactgagaggcggtgagtttggcggtgatgcccacttcgtccagctacgaggtcatgaaacaccgtatcagcatgaagtcgaccacggtggaagatgttacaggtatgagactgacgaaaacgctaccggcgttgttttggctctcgaaggagagcttgacaccttgacccgccgtggcgggagcttgaaaggtaatctcgaaagtggtaaccaggttgctaagactcaacgagttcccctcgctgatttgattgtcgtcgatcttgacccggaggaagtaatcaagatccgtgttggtgttgtcgttgtaggcggcaaagcttagcgtgtagtagctattggggactaggttggtgatggtttgagagatgataccaaagttcggagcgatagtgccgtccctgacccgtttggcccaccagtgccatctacgggtatggtcaagacgatcagaatcgatcgttcgagccagtatcactacggccacttaccctagagcgataggaggggatccgtgaggttgagatatgtcaggtccccaaccgacagtgccgtctctgttagtgctgacgtcccagttgaaggcgtcggctgtaggatgtctgatatcagtatcgttcgacgaaggggatggccaaaacctctcacaatcgaaagcaccgttctgaacgatgccgttcttcgagactgtggccaaagcaaatccggcggaggatagagcggcatggaggaaggtagagaaacgcatggctgggtgacttgagttgtgtattatcgatcgttgtaagagatagtgggtataagattactatcgaagtctatggtcaaaagaatgtggctgttgaaggagtgtagcgagcgagttgaatgcacaggacgattactgatgactgacaaagatagttcagaagtgtttgttgggacatgttacaatgcactattgccatgatgcacctttatagattattcctgatgaaaacaatgaccagctgagaggaagagggcttcgcctcggtcaaggcgaataatttctgaaacgacaaccatcgggttgtttttgttcgagcggtggcggatcccacggtaaaagccacgtcgtaaatcaggtccgacctgcaagcgagtccgggtggcgcattccgggatcctgtatatcccgaacttcttcgtcacaccaacgaacgaggcctagagtggagctgtgccgaagaacgcgcgacgaggcacgacgtttcagctcgcacaaaagagaatcggtcgagcgtcgtgcgcggatccttttgtggttcgcgcgacgcgagacgtttcgacccaaaaactctctttgttcgcatgaccctcgaaacacatgaacacatttgctcggggacgtcgtacccacgctctatcgcctctcgtgaaatacttgtgatgggtataccctgcacacgttctacaatcaaaagtctacggcacacacggaccgctctactcctcgtcactatcctcgtcatcatcctctacgccgatgagacctccgttcccacccgcagggcgctccctcaattccctaccagcagccctcagcttgggtccaaagacggacctcgccgagttgttcgagccgatgtcccaaatctgaaccttggcggccgaaccggcagccgcgagcgtgagcggcgagtcgggcgagaaaccgacggtaaagaccttgccctgcggtaagagaacaatagcgagaaatgtcagcatagagagtcgcttgctcgatcgatcgatgacagggggactctacttaccacgcccaaatctcggctgacggccaacgagacctccctcttgccgccatcctcctcgttgacgttccacaccttgaccttgccatccattccaccggttgcgatacaacctctgatatgagggttgatatccagggcagaggccgggccgtcatgagccgagatggtgtacttaggctgaggcacgggtccggaaccttgctgagcttgcgagctgagcgttcgggcatcgtaagcgaggatgagaccgttctcgagcgagacctgcgatcgggacacggattacagagcttagcacggtcgaccaaggatctgccgaaccttctacgcccagggggcacactcacgaaaaagtccatcccggtccaggggtcccacttgatcgcctcgacgtcacttcccagcttgcccgtacccagagcttcttcgctcgccctcgtgtcccaaaccttgaccgacctctctccggcactcaagacgaccgtcttgttctctccactcttgtgcttgttccactcgacggccaagaccttttcgttggggtggatgttatcccacgatcggatggccgtctggggggtcgggcgggagaggtcccagagcttgacggtagcgtcggctgacgaggacaacaagaggttccgatggaacccggaccaagagagcgaggtcacgctcgagacgtggtgctcggcgttggtctggaggagcttcttcttcttcttcccggtccccttggctttaggaatggggtccatcaatgatcccggtgcggggccaagcatggcagtagggtagatcggatccagcatgtccatatcccagatctcgaccgtggggtccatcgtacccacagcgataaagtttccaaacccagaaggttcgccctcggaagcgcccttgccggtcgatccgtgagcggggaaatcgagccattcgacgcagagcggccagccaccgagcatgagatcgtgatggacgtagaggttgtcgttgggctcgtcgtagacgtggtagtccagggaggagaggtcggaagaggttcgggcggtgatgaggatagagtccgaggggaggatctcgagagcttcacggtcgacattctgctcttcgggctgcgagaaggaatggtcaggatcggcgagccgccgggaggacaagcggtgcgacagggtcgacctgactcacgtcttccttgagggtgatatagggatcgtcgttgatgtcctggtgcaccttgagacctccgagattggagaaagctcccatcgctaagcacgggatgcatgtcagcatgttctcgccgcgctgtcgaccgagctcccgttgacacttaccggtcccccggctcacttcctcgtcatagttgtccaagttgtatgccgacaggtcattaggatctgtaggtcccgcgggtttgtcatcttcgacgtccatatctccgtcctccttgtcctcctttgacgaggtagacgactcgcccgagacggattcgctaatgggatcatagtaccggtcggatcggatgatcagccaacatggtctcgaaacgctcgagatgaatggtcccaacgctctcgactactcactctgcccactcgtcgtcatcactcccagcggcctgctgttctccacctcccatttccatcctctccatttcggctcttagcttttcgagagctccttctccgcccatcttgccgacccgttcgagttcgctttcgtccaacgtgtagttggtcggtcgagccgaggcccgacctcgtggtacccaaacgatggatgagatgagagtcgacatggatgtgattgctcgtcgtcgttgtcaacgaagttcaagctggtagatgccagggtgcaatgtacaaatggcatgcatgtgtgcacgatgatgatggggtcatcttggggggtaggtagcaagatttccctctgatcaacggttcgaaataatttgattccgcgcgaaaccgaccaaagtcaagttcaagaaagtgtaaagtcgacgaactcggtcgaacaactaatactagttcaatccactacccgtaccctcatacgcctcgacagcttcatactaccacacactctgaacgactcggggaacattcctgcggacttcctctgccatgccagacttttctaccccagcagagcacgctttcgaagctcacgatgcggacccttccaaccccgaagaagctaccctatcgacctccacctcggccctctccctctcggatcggtattccatcccatcgaccctctcgcacatccttgagaacgatgcctaccgtgtgatagcgcttcaattccccgacgagctcttatcggatagcgtgctcgtctaccggatgctcatgaagggcctgaaggaggacgagcgacggaggcgagcagaggggcaagagatcgcggtggagaggcaatgttacgtcttgggggatagcacatatgggagctgttgcccggacgtcttgtcctcgttacatcttccggccgatatcctggttcactacgggcatgcatgcttgaccaagtacgtctcgaccgggctcgtctcgtttcattcgcaccatatctgactcgaattctaggaccgaggcgcttcccgtgctgtacgtctttcccaagagagagctcgactcgaaagtcgttgccggacaactctttcaggtggcaacatcagatgaagatggtctcgccgagaacgtcgtggttctatgggacgtcgcatacgactggcttcgaggtatatccccctagcctgaaaacaccgctcgataatcagctcgacgcttacgcttcgtccatctggtctttgtagacgacattgtcaaatccctgaacgacgcgtctccgagctcgctcaagaacctcatcttctcgacgatcaattcggacccgtcctccaccgcctcgtcctcccgcccgtctcccgctcaagctcgatcaggatgttgttccagctcgccgtccgggtcgaattcgtgctgccaaaccgagtctacggacaagggcaaaggaaaggcgtgcggatgcgctggggtggaagcggggatgcaacaactaggcttggtcaaccagggcggaatccaggtggacgtcaccgagcacgcggcgtcatcacgacctggaaagactgacgagggtgaaattcggcaagatgtcggacacggctcggcctccagcttgaggtcgtttgatttcccggacgggatagggatgaaggattgtacaatcttttacatcggggaagagagccggggggtgatcaatttgatgatggagaacagcggcagcaaggtgagtctctgctccacactcgctcatccgtctgtctttcagtgcgattgcaggatctaacggtcgtccctatgcaggtctatcaatacgacccttcctcctcctccgtcgttgctctgcacacgcggacgccgaggctgttgcaaaagcgtctcctcgccttgcatcggatgtaccagacgacgaccatcgggatcctcgtgcacaacgtcggtctccgatcctcccacgccgtggtcaaggatctccggaaactcatccgggacaagggtcggaagagttatacgatcagcgtgggacgggtccgaccggaaaagctggccaactttgaagcgatcggcggttgggtcttggtcgggtgcagggagggagggttgatcgatgggaaagagtattaccggcccatcgtcacgccgcacgagttgagattggcactccagggagagatggagagttggaaaccggaggattggaccttggatctagaggccgtgttgcgaggtaggtcgacatcgtaccacgtcggaatacgattcgagactgataaccctcaacgcggtggcgtttcgaaaacagacatcaagcgggatcgcgttacggctgaaaacgccgaagagggcggggacgaggacgtcgatgatgaccggccgatcttttccctggcggatgggtcttatcacatgacgagacgatatggtggcaaggacgagcaggtcgacgagacgtctcccgccggcgaaggcgcgttgatccggcggcctgaaggaggagctctgatcaagcgcagcgaggctggacgagttgcaggtgagaaagcgatgatcggggctgtagctgactcgggatgcatcgcgcttatccgtgtacgaactacacagcggttcatctcgctggccgagcattccaagggttggacgcttacgaagggtacgatgcgaccgggacgttggcgccgagcgagttggtcgatggccgcgtaggggtcgctaggggttaccgggtggacacgctgggcaaggaaggtcaaggtcattagagcgggcttgggcggttgtacgtcgtgtcaagtgtagagctacatgtccgtccagtgtcagagtcatcgatttattgtatgtgacgacgacgacgaccacgacgacgaggcgccgacgggagaaacgtttgtttacgggaaatcccgccggcgccctcgtcctttgcccccacaccacctgagaggagcagtcaaagggtcaatcttctcccgtgtaaatctcgataaatgtgctcatgaaccgttaaacgtaccaaaagtcatacggacaaacccatcatcatgtggttctgactctcgtccagcactattccaaggcccagttcagcaacgcccgtattagctacaggtctagtcagaccattgctgcctatgaccacacgctttagctcgtgcagctcgcctgtctcgacatagcctcacctcgaactacacctgatccggtcctacatacgcccgtctaggttgacggctgaatcatcgttggacagacatgtccagagatcgatcaggatcgaaccagtctaaacacaagctctcgctctcctccggcagctcgattctcgggcagcatcatcatcaccatcatcgagggagaaagtcggtttcgtctggtcatggtgcgagtacatctggtcaccgtcctaccgagtcggtcacttcgggctcgacgacgctcagccggaaacgagtgcgaacgatacctcgtgagtttcatcggggatcgacgccgatttcttccttgaccaaagctcatgatccgccgctctcagcctttgctcgtcatgatcccccatccccaccaacttctccccggttgcagccgacatccccaacgggacccaaccacaacccaggaccatcgataacatccctagaaccgaccctgaccaactcttcctttgatcctacacgacctcaaagtccgtacggcgggtcactcgaagctgacgaccccaacgtcccggcttcatggtggacgtttgcgatccctggaagataccgagcctttcatgggattcaagctgcatggcaggagacggtacaggccaacgaacgattacgagccgagtcggaacatttgggaaaggattacttttccaacaaacgtcgcaagtcgagtacggatgtcgaggcgcagtctgtgaggggacgtcgtaggctgagcaccatcggaggggaagatggggatgcgatcgagatggacgggacgacaatggtgcaggacaagctcgaatcgggcaaggagaagcggatgcggttcaataccctgtccctaccaggttctcgtcgagcctcgaccgacaacattggacgtcctgcttcgcatgatcggtcgttcactttgggtcctcctatcaaagggtctctgctgtcgagcgggaaaaagtactcgttcctttcaagcagagcgcccaacagatccaaatccaccccgacgtccctgcacgaagacactccgacgcccctagacggaccgatcatcgaaggcgtcgctacggccgaatcacccgttgatgctcaaatccctactcccaggaccccagagagaccgacgttgaacatcgccatcccgccgcccatcttcgcttccggtccacccggattcggctacagaccacctttccaggccctctccccaccgacacccgacgcatgggatagaccatacagcgaattcagtagtcccgctcagacgtcccgtgtagcgcaaagaggcagtatggcaggcggtgctcatcctcccagcccatggagtcagccttaccagtcgacggactatgggtttcgacatgagatcaacgacaacgagcctacgttctcgggcgatacgttggtcaacggtagagacgcctcgagggagaaggatggcaagtggcagaacagacggacaaagatgaaaggcaaagccgcacaggcatccgggtggagcgcattgaggagaaagttgatcaaagagggtccggggggcacgcttcggcagaggacgaggaggttcttgatttttgatgcgaggagcgctctttatctgcgtctctttggatgtgcatgtgttattatcgcgctaggtgagtcgagagcgagtctggacaaggacgtatgacatgctgaatcgcgattgccatcagtcctctctatcctcaactatcggttcgagcagagcatcgggacggcgggaatcatcggctcttcccctctcctcacgattggctatgcatcggtgacgatcgtccaccagttggtagcaacttacagagagtctttcggccggcccattgggctttggggattgaggagcaagatcgtctgggtttgtggtgacctcttcttcatagccttgtggtaagcccagtatcgtcgatcgagcgcatcttaccagtcttgctaatagagattgatgtctgccatcctaggtcatccgatttatccttgaccatctcggattacatgtccactcctctcttgtgcacagagtcatctccctggtggtcgagtataccacaatttgaactgccccggagcgtaacgacatcgcgagacaaggacgacgtctgcaaacggcaggccgtgctggtcgcctttgtcctcctcaccacggtcagctacgtcgccaatatggtactgagcctcttccgaatcatggagaggatacgagtcgttgcgaaacaatacgaacgggctggaacgacacaattctgaacacgacgagctgcatccccgatacgacctacaccctatacccctattcgcgtcccgcagtgcccaagcccacccacattgacgtgattatccttacgattcgcgattcgctcagcttcagaatctctaatgtatactcttcttggctgtatacacgaggcaaataacatgtgctatatgctgtatcactataggatcgagttgcgagttgaatgggaacgaaattcgcggcatccttccgacctggcctcggttgttcatgaccaggttcgtcatctgttccggaggcaaactgattccgatcattaggcgaccgagcgttgaccaagatagacagactcttctactaccactactctgctcatcattcgagaccccacgttctgtagatagagcgagagcaggggtagctaccacctatccgactagtatcaagtaatcgagagcataagagaaactcggctctacgagcattgcggcacgcccgtaaagttaccggccgacccgtcgactcttgatgacctagtcgttcaactgggtcgccatgcaaggcgtcgacgcatcgccacaccggctgaccacctttccggttgcgtttcctgaagaggaggagaaaaatcaggtcaaccaggtcatatcctctttattcagcaaagtcagatctcgattcgcgcctcccactcctggaagtagctcggggattgcggctagcactcagcaatcagacccggtggtcatctcggaagaaagggatgggccagctcgtcgaacgacttcttcgataggaggggcacagggacgaggttctagacctacgaatcaggacctcgaagcctatacttttggccggccagattccgcttcagcaggtgaaggttccgccagtcgaccaccgtcgttacacctgcctccgagcgagtccagcaagccgatctctgtcaagtcgtcgatcaggcctcctgctttgcctcggtcgctctcgagtcgtcccgccccaggacccgctccgcctcttatatcgacgactcccgtcatcagaactcaggactttgcccattatctgcatcagacggccacagggtcgagcgataatctgtcgacaacggccaacggtgcatcgacgccgattcggacccgagacaggtcagattcccgctcgtacgttccgagacatcgtcacactggttcggcttcatcgttcacccgattccgcaagccgtccatatcgggttccctcctgcaattctcgcccagctctgccaaccttgcctcgtcatatcaaagcgatggcgcgcccttcgattacacgcaaattcccggtttcgctatcgcggacgacgctcggagcatacacaccattgacaccgccgctggctatacggctaactctgggctgggcggggatggcaagggaagacgcaaaagggaaaataaagagggtcaagtgagcgtagccaagatcatcaggaggctcagaggcgaaggactcaggtgagtggcgttgaaattgtgtggactgttcatatgtcgtaaagctgatcgcgctgttcgtggacagcaaggtatactggatggcagacgaaacctgtaaggagtgttacgactgcaaatcggtatgtaaacatcgacaatggtaaaggcatctgtaggtctgatgcaactcgctgtttcagatcttttcagcttggagaagaaagcatcattgtcggatatgcggccagatattctgttcccgatgcgcaccgaacataatcaagggtatgccgttggaccgtgtctgcaagtttcaccaaatgtgacgctgactccagctttgaggtttttggcaggctaccggtttggagtcgaaggcaccgtgcgcgtctgtaatctatgcctggagctgatgaatgaatgcgacgatgaagaggatcgccggtcagtcacatcgaatgggacctcgcagctacccctctcggctggaccagtatttcatgtctcggaggaaattacacatcacaacggcaaacaaccttttggatatagccagtcgccgtttgcagcgtctcagctctttcggcatgttagccatggcgatacattgggagcgattcgagagactgggtatcgaagaacgagcgggaactcggccctggatgaccgctcggacgatcaggagtcacctcctgggacgcccttgtacgagcgtggacggtcagattcccttctgggagtccgaacgaagcatcccctgctgcatgtgagccccaggaatacgagccgcgctccgggcgattccgctccgtttcgacggactataaacgaggaagacacaggaacagatggtcatggaactcccaaatcgcatgacatggacatcgatcgtgtggaggagcaccggagtatgccttccgtgaacaagacggtcggcgcggatccactgctagtatccgaagaagctttgacacgaagtgtgaggtcgccacgaatggaatctgcacaatcagaagcggaaagggcgatgcagcctttgatagcctttccgaccacgagtctatcgaactcgcccacgaacgagaagacgcccgatcttccgtcacaccttctttctccccaatccaacaagaccgacttcccggtaggcaaacccccgggggctttacgaacaagactttctagtcgggtatcgacctcgggactatccggcgtcttgctctcggataacatgggctttagcaaaatgtggggcgacgatcacgacctgcccgagggagggaatgacgtgctcccggtggcatcgctatcctacttccgcttgatgctcaagcagatgttggaaagggaaaacatcgctaaagcgaatgactgggaggaagtgttgacccgcctcctcttgcagaccgcctcgacaatcaagtcgtcggtcgacgcgggcgattccatggacgtcaggacgtacgtcaaaatcaagaaaatacccggaggcaagatttctcagtcggaatacgtcgatggtaccgtcatcacgaagaatttggaacacaagcacatgcctcgccacatgcttaaccctcgcatcatgcttctaacgtttccgatcgattaccaccgcgtagagagtcagctcgtttccctggagccgttattagcgcaggaacgcaattacttgcaacatctcacaaggcgtattacggatctacggcctcatatcgtcctggtagaacggaacgtctctcggctggcgcttgatttcctcatgaacgccaaagtgtcggtcgcgcgaggtgtcaagccttctgcgcttcagcaagtagcccgctgtactcaggcggatatcataggatcaatggatcggctagcaatggaaccgcgtctcggccgctgcgtggaattcaaggtacagacgtttgaacacagactcatccctggctttcgcaagacgtttatgcggttcgagggatgccacgcggcttttggctgcaccctcatcctaagaggaagtgatgtagaccgactgcaggccatcaagcgaatcactgactttctggtactagtcatgaacaatctgaaaatggaggtctgcctcttctacgacgatttcaatatcatacctcccgccagtctcatgagagaacagagcgagccacctgatgtcagacgacaatcttctcttagcggaacatctgcatttgaatctttgggtagagccagcacgacatcgattcgcaaagatcgagctgaacaacaagaacaggcagatcgacaaagtgaagagatcgaaaagagcttgaggccttacctggacgttgcaatttctagctcggcagccattgcatatccgcccccagctcccatcgcgaggatgagccaattagaccggcggctaaggcatctccggcaggctcgagatgaggctgaagccgagcagatcttgttggaagaaggacgaggggcaacaacgcctcgaggcaacgaggggcagcacgtacaagatctctctctcgactctcaagagtcgtctcacagcaacaagacggtcaaggcttctgatcagatgagtgagaaggagcccgatctacaggtgactgctacagtgttgctggcgatcgaggagatcaggctggaaagtgatatcgctcagaccgagttcgaccacgccgaacagctcaagctatggagctggtatgtcagtcgtcatcctgccgatctacgacccgagctctatcaagggatcaactacctctcgtcattggtttgcgaaggatcagacaagccttgcgtcggccctcaaatgctcacccgaaacttctatatgcatggcgatcgcaccatcggacagtatctggaaaacctctgcagcgaggccacccaggcatgtcccaacaaacaatgcaacaaactgcaattgcaccatttccaggttctcgtccacggttcgacgcgcctgcagatcgccatcgaccagtttccctgtccgtccccgggtaacgagaacaaaatcattacttggagctattgcaagtcgtgcaaagaagcgtctccaacggctttgataaaggaggaaacctggaacatgtcttggtccaagtatctggagcacgctttctacccgcctagcatccgtggagggtttggatgtcctcacgatgcgtatcgagatcagatccggtatttcgcactgcgaaatctggctattcgtgtgcacaacgaggagatcgacatttacgaagtgcaacggccatctctgacgttacaagtgcgtcaggaaagtcgtgtactcatcaagaaccaggaatacgccacgataagctccaagtcagcgagcttcttcgactcggtctcgcttcgactcagaactttcgattgccagctagttaaaccagatagtatcgaggaactgcggcaggatctcgtcaagctttcggagcgcgctatatctgaccgcagaataatgcaggacaacctcgaccggacatacaaattgtcgtcagccacggacgtcttggcactaaatgcggtgtacttggccctgcaggataaggtcgtgcagtgggacacggacttttcggatcttgacaagagatatttaccgtctgaaaaagatatacgccacatgactgctgctcatttgaagagactttttgctggacaagactttttccctagtgctgatagaactgtcagtggtcagaccataaccgatcttggagaagaccccatcaaagagctggacggatctgtgtcaggggacaccctcgaaaagcaggattacgcaaattgcggcaccctcaaggaccattcagccagccaggatgtggaagtacctgctctagtcctggaccatttcgatgatgaattggccacccctcttgccgaaagaccgtcttgcgctgagctggttccagccgatggaaatggtgcgggcgacaaggattacgacagcgagtcgaccatctccgcattgccacgtggtatactggagacccgtccgctaaccgcttgtcgccaagcagactcgagtacaagtggcttggagtcggacgcaatggtctttgcttccagattgcctcgaagaactcgaccggcacctacagtggcagacctggttcggagatttcaagactcgacacagctcgagcggactatcgagtcgctcggttatcgccttccggcttcagtcaatctcctcgagcaagatccgcgcgagtctgacagcgatcaagatcgtcagatgcggccccgattgaagcgaggcaagactgaaggctatcattcgcgaaacaggacaatcaagtcgagcggaatgtctgatggcggcggaagctacgctctgaatgcgtcccgaatacctaccttgtctgccgctcgacgccctacactaaatcgctatctttcggtgggacacgaaatcaaagaggaggagcctgacaacctcgatgaagcgccagactcgagcgcagcaatactctctcgacgaagccactcgccgcgcctccgtcgcaataacaccgatctatcgatcgaacgcgatcgaacgaagcgacaaagggccgagatcggcaaggtgggaaagggcaaggctcctattcgcaacgcggtcaagcaagataccctgggcgacaactcgcgaccgagcacgccgggtgccagagctgcgtctcgtcgtggaggcaatctcggagggggtaacagagtcagcactatcgcacgccatttcgaccgcctgtcgaaagaggcggaacgcgatcatgtccgccggatgaaccaagcgcgtggtcggcgggctcggccggtcggcattactcgagccaagatacacgtttttagcaatgctcgcgatgcattccgagacgacgagaccgactctgcctccagcgaagctgacgacgaggaagacaacgaagccggcgacgatttctctgatagggaggtcggaaaagcctctaaatcggctcttcgatcgttgacagcggaagtcagtccagtagcggaagacgttatgccaacaaacggtggtttgcaaggcccgatctcgacagcaaacgggaaacatgtcgtatccggttcttcaacgccaccatttgaaccctcctccgtcacgacgtcagaagcccctacagatgtgtcattcagagatcgcctgcagatcactctacctccttttgctacatcaacgcctcttcttagtgtgcctccaacgccgctgctcacaggccaagccgaaactcatgcagcagcagcttctcacgcgtctgaaagcgaggcgcaagggtctgtcggtcaagagaggcattcaattctcaaaacgctgtccaacctctgggcttatcggtccggcgacgtcaccctcttggagtatcctttgtaagttcaggactattaccgtaccgccgctcgaggcttcaaaagattgacgattcccgcttctcccagatctgcttcggaacacgtattcacggattcttcaatcatcgtccgagaggatgaacccacatcgatcatcgcctttacgcttgcctcgaaaacgtatagggatagacttcgcagcgttgggcatctaagaagagatgctaggcgaacagacgttaccaccgaggcttcgaacaatgcttcgatcgacgacggcgcttctgtatactcctttgggaatacctatgatgatgcgcaagacacagatgacgccggcaaacgcgaaggtgggacacatatcaattatggtgagtggcgtggtttcattcgattgggagtgcttcttagccggcagatgaccttaccacgaccccgttaccagatatcgagaccggtagctctaccatttcatgtcgcatcttttacgccgagcgatttgccgcccttcgctcgagctgcgggtgtgaagatcgattcattgactcgctcgctcggtgcatcaagtttgacagctctggtggcaaatcgggatctgcatttttgaagactcgaggtaagcacgtcgtctgttctgacgtggtatacgtgttgacgaccgccttgttccagacgaccggttcatagctaaggaggtatcgaggctcgaactggacgccctcacgaagtttgctccctcctatttcgagtacatgaaacagagtatctcgcacaaggtattggcttggcaccgcgacaaaagtgatctttccctcgttgattcgccttcactttgtcagcggccgaccgcattggccaagatatatggctgtttcaaaatcggctataacaataccaccaccgggaaagccatgcgtatgaacgtggtcatcatggagaatctcttctatgaacgccgctttgatcgggtcagccggatttgctttgccatttcattgatctcttgatctggaactgaaaggcttggctttcgcttgacttcccgtagatctatgacttgaaggggagcatacggaaccgattggttcaggcgaccgggaaagaaaaccaagtgctgtaagtcaggtaagactttaatgaaggtatcaccgggactaaggacttgaatcgtgcaggttggacgagaaccttatggagggcaagtcatggtttttatgggtcatccgcggtcaattctaaactttacctcgtatagtcatcaatcgacaaccactatatatgcgagatcattgcaagcaaattttgcgaactgcgttatggaacgatagtgagcaacctcgatcaaactgactttatgtaggccgtcgttaagccttggtctgcttatagctctattcttgtctggtctgaacgtcatggactactcgctggtcgttggagtcgatgtcgagagaaaggagctggtagtaggagtcgtggactacataaggacttttacatggtcggtcacttcacgctccatagactgtcggcgatccacgtactcacgttttcacggactgatagggacaagaagctggagtcttgggtgaaagatctcggcggaggtggacgcggcgagccgacgattgttacgcctaaacaatgtgagcacgtcgtgaccataggccgagtagacacgtcagatcgcgtctgacctaggtttgcaccttgtagacaaggttcgatacaggacagcgatggaaaagtactttccggctgtacccgatcgctggacaaagattacaggagatggagggatcaaccagaacccagaggacgattccgctcaggcgctatagcgccaatgctaatgacagcaacgacaaccgaacgaccacgactttgcccatacatacatacaatgccaagtcttcaagggatcgcccatactttgtaccgagatgccccacgtttgaatcgatcaatcaagtgtcatcaatgtcgtcatggtcgtgaaagaaagctacatatgttgccgaccggggatctagttgtcgttcatcgaaacgtcaaagagggtcgatatgctacccttgggcttgtgctcgccgtctcgttccgagtcgctctgcatcgtcatgggctttctcatgtcttctagggagcccatcgagtcgacggatttcttgacctcgtgatgtgctttgacgggccgggcggcgataatgtccatgacacttctcggtgctttggtcaagttcttgttgtgtcgaagggtctcatgttcctcctttttcctctgcgcatgtgcttgtttgatggtatcggccaggtcgcccagaggtggcgattcgacgatggtttcggcgggaccgggcgtcgattcgatgctggcaggctcggcgctggcggatcgaccaaagaaggaggaccaacgagatacgggtctagcgggtctcacattgtttgccgacgacgaagtggccgagacgttgctctgagcgctactggacctctgtataccttgaccggtggtgttgggcgacaagagatgcggcgaaccgttttcagcaggcgcatcgacgcccatgagtttcatggtcgccgccagtcgctcgcgctcgaccctgtcttcgtcgtcttcctcgtgggtttgtaatttccgcccgccaacacgagctgcaggcgactcgcttccagcccgaggctctgggatgctgggacccgtctctgtccgtggcgaaggcgtcccactcggccccccaccaccgaaccctgcaaatgacccccaattgagggacaatcctcgacgggcctgccaataaaaaagggcgtaagtcgagctcggtcccggtgacatctcgagccggatcaccgctcaccctcttgtccgaggccgagtcgggctctgtcttgggaggttcgggcgatggcgagtcggttctcccagccaacatgctcaggggtctcagtcccgtctttggatccacctgggcgacgagctcctccgagttgctcgagtacaagacactctgcggtcgaacgcgattgctcgcttgacgttgacgagtcgggcggacgggtattttgcgcgatgttgccgggtcagacgagacgtctgccaggaattgctccgagtctgacaggtggatgagggctgtcgctcagtggcgtgatgaggtagggtctgatcggctcgagaactcaccggaatgactgaggatccggtcgagtatctggaagcatccgagaaagttggcctcgggacctcggttgaacgggggcgcacgcctcgtcgactcaccttggaacagtacaacctcaaccctcgattcgcttctgacagatgtttcaattcgagccgcaagtctgccgcgcgagacgaatctcagtttgtggtgaccgatccgaaaagagctaaccgcgccgccacccaccttcattctcctccttgatcttgtccatctctgcgtcttgcgcgggcttgcttgtttggtccatctcgcccttgccaaacgcctcgaggtcgaacctgcccaactcgtccgccaagctctttcccctctctctcctactcgccttggagaccgagcctacggtggacttgatcgttccgtggtccaccgccagaggtggcgcgcccccgccgccgaacccgaacccgatccccaacccaatcccgatggtaccatcgatcgtcctcgtcccgaccaacttttcccagacctcgttttcctctctcaaccgctcgttgatctccttttcttctttgacggtggattccgacctggcgagccgatgttgcagttcgaggtgggtcttttggaggtgagacagcgtcgcctgggtctcgctcaacgagtcgaagagtcgggcgagttcggcgtgtggcaagggggaagtcggtcttcctagagtcccgctcgggtccttgtcgtcgaggaggaccgatcgtccctctcgttcggcctcgagctgatccacccggtcgaccaatcgtttcttttccctctgtagccgctccaagcgggtccggtcggcttcgtgggtgtcggtccattgttgtcgttcaaggtcgaacccttgtttctagtcagggtgaaccgaacgccgacgaactcggatgaggatcacgccgccttcttttcgacactactctgccccggtcgtgctcacctggtgttccaacctcttctcccacccggctgcttccctctcgagcaacttgaccctctcccgggtccgttcgagcaggacgtccttttcgaccaaggcctgttccgtcctttcgttatcctgcgtcaaatcggccagtcgacgtgcgaggtgcgcgttctggggctctaggtgggtgatctttgacgaggggtccgaagcggactagacgatccgtacacacaaatcagtgatctcatacgggagatgaggctcgggagaccgatcctcgctcacgttctttgccggagaagcggtcttgaacgtccccgagacgtttctcgagttggggaggaggacgggtttaccgggcgatcctgcgttcttgttctgtctggccgacaaggggcgtcgggtgataggcgtcgacatgttgacgaggacgagggggggttgaggtcgacgtatggtggtactagtggaagtcgttgcgatcctggggttttagcgtcttatcgttctcgagtctgtcgggagagcgtgtttacagaggttatcgttgttgttgtcgtcgtcgtcgtgattcgtttcttcgatctgctaaacgatcagatcagatccgagcgtggcggtttcgtcgacttgggaagcgtttgtaactaatcaaacgtgatcagggagaccgtctgtccctccctctctctctctctctctctatctgaaatggtaccgagcgtccttcacacgtcgactatgttcaaggtgtcttgcgacgtcgtctactagccactagctgctagctgctagtctgatctattatcctgtgtgagctcttgaatcgaccgaagtcaactagcacctagagtctatcatccaatatgatgcatctgatgatgttgatgagctgatgatcctcttcccatctcatcccatcactccccaaccccccttggcgctacatttccctttgtttattttgtgtcaatcccgagtttactctaattatacttccgtaatccgtaatcaaggaaggaaacaaatcccgatcactctcgcttccggggtcagcgggggcaaggggtatcaaacgcggaccacgcgatccggtgaggtcgggatcaggtcgaattcgctgtgaatatggtcgagctcccagggaatcgggagatcagggcgtctgagaagacgagaatgagagagatggaaatggagggttcttctaggcgacgcgcggggtggggtgtgatcgatcggtttcgaatcttaacctcccgcggaggtggtacgaaatgggtaaaataaggatgccaatcagtcgcaagtcgtcgcagctcaatagtcgtgttcgcggtacggcagtgtatgtatgtatgtatgatcggggcgaatgaaagcatgctcgagccatgccgatgcgagatgatcctctagcatctacgatcatgaagatgacggtgttctccaatcgagggtgaccttgtacgtacgattccgaacggtcgggacgggagagcacctggacagatgtacagttgaatcgacctcggggatcaggtcgagcgagggtacccttcagtggggcatgacgcgtcatcaaacatcagagagacacaggagacttgtcgagtacgcgagcgagtgagagtgagtgagcgagacatgagcgagcgaggtaggtcctggcttcggactttacatcgaggagaggcgtagggggaggcaggaagctaggaaggcaggaagtggaggtcgcgcgggtgaatgcgactggataagcgcgtcgaggtctttgcgcttctacttgatcgatgtgcgcgctggccactgagctgcttgtctgtctgttggtgagagacagactctcgatctgttgagggcagaggcgacgcgcaaataatccccgcgagtcgactcgggatctcactgctcagccaagctcccaccagctcgctgacctcgctcacccatccccggcgacgacctctcgacgacgacgaccacctcccattcacatctcgtccacacaccacccacaccgacctaccatcctcaccgcaccccgcctacctcctggctgctcgttcgacaaaccaccctcacccccgttctcttctcgactttagatcgacccaccacctcttccctttccacccccctttcgctcggcctaggaagaatagacaagagaccctcaccacccccaacacactcaaaatggctaccgctactttgccttcggacgtcaacaaggttgcccaggagggtaccgtcaagctctttggacgttggaacaccaacgagtgagttgaaatcgacgggcggcaggcaggcaggcaggcacaggaggaggagagcaagaggaaaacacggcggggattcggacgaggaagatggacgatggcataggatacagccccgtggactttgatcgtcgacatacgacgacacggggacggataaatgaggacaaggtcgggatgacgagctcgtcgctcgtcgtgatgaaccgacggaaggacggacggacgaacctttgccgccatctcgccggtctggacaaccatcgcggtcgaccgggactcgacacccggatcgcgtctgatcgacatgtcatcctctgaacctgtctatcggcgaggacgggacgacgacccaccccgcctacttcagacgactcgacttgcccggctacacgatcccacaccatctctctttgcctaccttgctcctacctcgatctcctcctgtctagctgcctgcctagctgccggaccacactacccgcaccgagacctaacgagctgatcccatccatccttactcttgtcttcctgcgttccatagcatcgaggtcaaggacatctccctcgtcgactacatcaacgttcagcatgccgtctacgttcgtgagtagacaactgagtttgagaaattgccgcagggggacgagcgtcatgctgacttgtgattgaacacgccttgcctctccgttgtcgttgctgtcgttgtcgccgccctctagcccacaccgctggccgatacgccaagaagcagttcgccaagggtcgtatgcccatcgtcgagcgtctcgtcaacagcttgatgatgaacggaaggaacaacggaaagaagctcttggccgtcaggatcgtcgcccacgctttcgagattatccacttgttgaccgaccagaaccctatccaggtcagtagcgctcatccgcctcgtatggcctcagttggcccgggcgaccgtgactgacgatccatcgaccgattactcttcctcgtgataaacaggtcttggtcgacgccatcgtcaacaccggtccccgtgaggactctacccgaatcggatcccagggaaccgtcaggcgacaggccgtcgatgtctctcccttgaggagggttaaccaggccatcgccttgttgaccattggtgtaagtcttccacgctcgctggacctcttgtccccgcctaatcgctcatcaaaccaatcccccgatcgtcgttgtgtgcagacccgagaatccgctttccacaacgtcaagtccatctcggaatgtctcgccgacgagctcgccaacgccgccaagggatcttccaactcgtacgccatcaagaagaaggacgagctcgagcgtgtggccaagagcaaccgataaacgccatacaccgttttcgcgcgcgcgctcggatttccccgtctctcgtcatgcgatacatggggtctcgtgcgtttgtctgtttgtcgctagtcggttgagggaggtgaatagtggccgggaggaggagcaagtgcgtcggttcgttgttgtaatctcgacgacgggcggcggaacgaggagggcgggaaaaagacgaggcggaggtagaggaggacgaggacgaggatctttctccccccaagccccctctcctcccttttttccgagcttcttcgtaacatgggatgaacgactcgtatgaaatgaatcattcggtcttttattatcagcgtggattcaaaaaggttctcgcgcccattgagtgtgtcagatgattgtgaagcgtttcgtgtcaagcggtgtgatgcacgacttgagagtgggtgtattgcctcagaaccacatgatgacgagtccggtctattgggtatcaacatcgttcgacccgtcgcgttgatcgctagtatctgaagcttcctgtcgttccggttcatgatcggcccgaggcttccgtcgttcaagtccactattgacctgaggcttccattgttccggactccacaaggttcagaccatctcagtccttctcggcctgatcgctccctgcctggtcctcactgaatacaagctactttgtcgagaatctgtaccgtaagtccagttgcgttcccgaagctcgtatggaggcctattcgaaaccatacctcggaaaaccgagggtttcaccccgagaaaggacgcgttatcgccgtcacaggatgatggcggcgtcggggatcattgatctggtcgcgatggtaacggctcgtacttctcgggttgatcccccctcgtacgcgatcgatccctcggaccgactgatcgagctccaagttgaccgggaggatcgactgaatgcgcttataccctgcggctggacccattcatggcttcatcgcaggaacacgctgagccgcccttgtaacctcagcctgatcagctaggcatgacacttcgataccgatctcaatcatcgcaggctcgcacattgcgatcccggctgacccgtgaccaagggaccaaagcgccagtgaaacactcgaccatatcgcgttcccttgcatcccgtacggtcgtgtgctttttttgcctattcgagtgtgccgagcacgcgacaggctttttacaagaattggaccatttgtcgtcatgaatccgggtcctaagaacttcgcggtggttaggatgtcgatcagtacctattacagcagatggacggtgaaagtctgtcggggcaggcgagccttgcatacaagggaagatcgccattatcacagacgtgaaagggcagtcgtcaagagcggccgggtagacaacgggtgctgcagcgagtcgaacgtttcaggcgtcgcgtgagggcctcaaaaaacgcgcgcattcgaaatacccgaaaccacgctgttggaatgtcccatatagagatcgttatgacgtcggaacccgatatcttgctacctatgatgagatgtagatagtggcgcatgcataccgcaacttgatacgtctaatttggctactgctattagggccctggtttccctcgtcgtggccttcaagtcagtcgttccaagattccaccgtgtgaagagtccggtttgcggcttagatcggcacgaaaaacaagacccccgcaattctttcccgccgcgagacgtacctcgcctggatgaatcgaagagtcataagtatcaaagtcagccggttcgaaaattcgttcacgtcaaccgggggaccaagttgatccgatctccaatggtctccaatggtctccaatggtctccaataatggtctccaataatatctccagactaagacgtagtaggctcacagagttggcacgcaggcttcgatcttgtgattagctcgaacacttggcccacaatgcatattgcaatgcctgtgcaggaaaaatccgtgagcttgctcagtttgtggtgaagagatacatcgtcatagcaccaaatcatcctgtaagcaagtctgcaaaagcgatcatgcagtgattacgatactcagtgctgccagctgacctcaagtaaaaagatacgacgtaccatcatttgctcttggtaggcaacggtcaatttccatatccccgatgatactgatatcgtcgacctggcgatctgctgctgcttccaccagaagatgtatccttgcagtcatcgagctgctttctttcctttggtcaatagatgatgacttctgcatttcagcctctccagcttcagtgaaagccttcatctcgcctctggacggtcttccgtgtctcgcacccccaaggcgacagttcaacaagacttgaccctacgccgaccgttgcgcgagacgttctaacatttctttgggcccacatgctgcacgtgccaaagcccgttgtatgagcgccgccccgcaattcgttgcatgatggatcgttaaaatgtggagagacacaggtgagaaagccttcatttacaagccacgactctatcggcccctgcctcgtcctcgacccctcatcgctcgtcccgctccgcctcgcggcatctggggtcccaggtcagtctgtttttcggaagatgagattgtacgcgtcagttatgcccatgccgacgacagacctgggacgacctcacgacctcactcgcactcacctgctcgctctgcgggttcctgaccgtctcgtctacgctcaagatcaaacaggcagcctcgacggcactgctgatggcgttgaccttgacgagcgcgggttcccacacaaacttttccatattgtcggccacgttttcactctcgacgtcgaccccggcccagagatctccctgagcgtgcctcatcctgagcttgttcaaacagtcggtcgcgtcgaacccggcattgtcacagatctgacgggggatgatctcgagcgccttggccatggccccgatgatgagctgttgcttgcccatgatcgtcctcgagtgatcccgcaggtatcgcgaaatctccatctcggcagctccaccccctgcgacaatctcgctgttcttgatcgctcgcttgacgatcatgatggaatcgtgaagcgatcgctcgacctcggcgataaactgttcggcacctcctcggagcaagagcgtacacgtcttcgccgcggtgcagtcctcgaacacgttgtacctctcggaaccgacctgcttttcctcgaacttgccacagcttcccaagtgcttttcctcgatatccgaacacgtcgactggacagctccaccgacggcctggaccactcgcttcaagtcgtcgtttgccacccgtccggcacaaaagatgtcccggtcggcaaagtactgagtggccaagtcgccgatggggagacgcgagaggacgaccttggcgccggtcttgacgatggcgtcgagtttccggtagatgatttgccactcggcgtcgacgatggcttggtattcctatcgatcgcatggacgtgccccgaaatgttcagcaggtcgattcttgggaatccccccatgcccccggtcgatactcaccgaaacctcgttgaccctgacctcggcattgtccttttccgccttgagctcgagttcgacgttgagacacaggaccttggggttgacaaagctcttgggttgctgttcgaacccggcgtaggaaaaggtctttttgaaggcgacccctcggatcaagagcgagtcctacggaagagcgacggtggggggaaggaatccgatcaacacgctgtgtttggacgacaggcgtctcgctcgtcaagtcgaaacgcacctgcattcctcctccgggcacctttttcacaccgatcagtccctcgttcagatcctcctggtcgagacacatgacggcgtcgacgaccatgttcgagaagaagggtttttgagagtggatgagcttggaagacattgacgttccggcgcattgcatgaggaggtctcggaacttgctatgaggatttgatcaagatcgacgaacctcgtcggtcagctagtgaatgaacgaccacacacaggtagcaagtccgtgtagactcacgcaggatcgctcttgtcgatagtgacggcgatctctcccagctttttgatggccaagacccgtccctcggtcaatcccttgatgatcgtgtgaacaccgacgccctcctcgacatagggcctgatctccttcaagatctcggcggcgagcagggtgacggaagtggtaccatccccgacctcggcgtcctgagcacgggcgatatcgaccaaggtcctcgcggcggggtgaacaatgtcgagcaatcgaaggagggtcgcaccgtcgtctacaggacgatgcgtgggtgagtgatgattagcaagaaatgcgacgccgagcatggccgtcacgatgagacccactagagatggtagcctctcccctgtcgttgacgatcaacttgtccattcccctaggtccgagcgttgtagcgatggtctgggccacggcgagacatgccgagatgttgctcaagagctgggcagttccctgagacgtgtcggttccctctgtcaaggaagcacatggaaagacctcgagatattagccgtgaaggtcctgtaccttgcgctttggtgctccgactgacctcgcaagaggacgaccgtaggttgctagaaagatgtgagatgttcatcatcagccgaggtcagacgggtgaatcgttggccgctgccgcttccgcgtccacgtaccattgaaggcataccgttcatcttgacgatgaactatgctttcttttcgttgggtttcgtcaggttataacgttacgagggctagttggggagacggtgtgggttgatagacgcaagcttggtgatcgacgacatcttctaggggtctgggtggtcgaggttgatcgctggtacattcgagcctcgttgctttcgttgaatggggagcggacatggaaacatttttttgaaaacaagtccaagtgaaatggggaaatgtccgcgcgagagaggagggcgtttcatcatggggtagatgaggggttcacagtatgacaagacgcgatgacatgagatcggtgcctatcaccttgtaactcgctgagaacaagcatcgccgtctctgtcagcacaaatgtacaggtgagagcttgttcggttcgacgtaaatcgggttcgagctcgatgaaattcgacgcgctcccggggtcaatacgagcacatatcacgttcgattcaacgtcgatgttcaggttcagcttcatatagggcggtttggtgtgcgagacatagttgattgaccataaagatcggatccctgacgttcgtccccctcgtgacctctcatacacgaagagacgacgaaatgacgggtgcgctgcgctccgagcaaggtgttcgacgtggggtccgacaggtatcctaaatgtcccaatttcgatttcgccgcgtcgttttgcttgggacagagcaagagcccgctccagtcatcgaactggcgggtcgaccacggcctagcccgtatgtataggcaatcagcaagacaaagccttctcatgacgggaactcgtcatcaaccgggatccccgccgaaacaatttgtcgcctcagctcttctggagctttcgctgcgaggcacaccccatttgggcgcttattaagggaacccctcacctagtggataagcacacgcagaaactatgcctcgcagttgaacggagaggaaagaggcaagtgcgcaagcgagagcaagtatctccggccagccctgcatcatgatcaacgcacccggaaccggacgaaagctcactagcggggaccctgtcattctcggtgtatgaatgatgaacatattgatactcatgctatcggctccactcattgtcgtctcgacccgtccaccgcctaggccttttcgatcgacttccaatcgagatgcctgatccaatccctgacgtaatcctccttcccgttgacgccatactttggcaagtagacgtgctcgaacaagctcacacaggccaacggggtgatcctcaagtgttcgggttccatggtactcgtcgggcctgtagcgcccgattgatccgatccgccgacgttcgaggtcgacgtggaggcgttggtggattcattggaagcgtcggtcgggcggaagaggtcggtcatggcgttccggcccatcatgtgtcgatttcggacgagcaaggtccccgcggcgtgggtgggcatgatctcgtatcggaccgacttggtaccctgtccagccttcatcctgacgagctgcgttaggtggggcggggcgggaacagcaaggtgagacgagagggggcccgcgggttagcgatccggagaccaaacaaccgcgagaccgatcgggtcgatcgacctcggcgcgacgtccaaactcacccagaggaaaccaccgccgaccatccctcttgctcgaccgacgagctggtcctccaagtgttccatggcggccgggatttttgatcgttgggaaacctcttgaacctcgcccgtcctcgtctaaaaacaatcatcgacaacgcgcgatcccaggaacgacggacgatcagcctcggactcggtgcccatcgcggcggtagggggtggacgacgtgtcgacttaccagcttttccaaaaagaagctcgtattcaagatcaagctcgcactgttgaaagcgaccgaacaccccgggtccctcgccgtctcgctgaggagggtgacaatgtccacgggttccgacgagggggatccactacgggctgatcggctggcgaggaggttacgtagggcctcgttggctgtgcgcggtttggaagaagaggcgaagatggccgtgagagatgaagatcagtctcaacctctccctccccgccccaggcccgacccatcgacgtcgacactcacacctcatctccccctccaacctatccccccaacccaaccctcaccctcggcggacgcgggcccgagcaaaaggtcgaacaaggacgtctaccagccccagcggttcaatatcatcgaagctttgagcgcgacggggttgaggtcgattaggtatgctcaggagatcccgggagccaagtgagtcgcgtcgcgttgagcgatagaaagaggagagtagggtcgggtcggttttggctatggctgagcgagatacgactacgaaaaacggaccagggctgactttccatccgccttttcgaccctgttgaactctgctccacctctagcctgatcctcgccaacgacctcctccctacggcctgtgagagtatcaccaggaacatcgagcacaacgacgtccatgcgatcccatacgagaccttgccggacgggatcacaccgaacgacgggcatgccggtcggggcaggaatcggaaaaagttcaagaggggcggagtcgtcgtcaaccagggggatgccaagtgagtcgaggtcgagtcggatcggttcgaaaccccttccaccgggaattaccgcttggaccgttgcaagacgaaagctaaactccgcgtaatgcgccactacagcaccctcttgtacgcccatagggaagaggcggacagggtagacgtcgtcgatctggacccttatggcactgccgcgccgtttatcgattccgccgtccagagcgtttcggacggggggttgttgtgcgtgacgtgtaccgacctggccgtcctcgccggatcgaattatccggaaaagtggtaagtccatgcgtggtcatacggccggcaacggctgggacgtcgctagggcgtttgagatcgggggtgactgatcgacgcggggttcgttccgtggtggtggtagttttgcgaattacggcggtgtaccggcaaagtcggaatactctcacgaaggcgtgagtgacgttgcccccatcgcctttctccccgagctcgtcaggctgatcctggttgcttctcgttcgtcggcaggcccttcgactcgtcttgtcaatgatctcgacctcggcagcgaggtacggacggtatatccagccggtactcagcttgtccatcgatttctacgtccgagtgtttgtccgcgtacatacgggacaaggcgtcgtcaagcacacctttacgtgagtcgaggcatgtgctggtcctgggttttcccccttcgcgtcgagcgagagatctccaggcttatcaggtccacacccgctcgcgcatgcaggaaacacgggctcgtctacgtgtgtcacttttgtcaggctcactatgaacaacccttcggacgtgtcctcgaaaaggtgactgccaagggagcccaggtggagagcttcaagtttatcagtggaccgcccgtcggcgaaaaatgtcctcaatgcgattcgggcatgaccgtgagtgcggatgacggatcgagatgggtgccccagacgtgggaagagctgagacgtttcatttccatcctcgaccctcttgtaggtgtgtggacccatgtggttgggtcccctgcacgattccgagttcgtggacgagttgatcacgacgatcgaggcggaaaaggagaattacgggacgttcccgaggatgaaggggatgttgactatggctcgagaggtaggtcctggacagcaacgtataatcgcccatgcgagatactaacgacgaacctgactgggaccttgcaacgtgctataggaaacgacggcacctttctactttacgccatccaagctggcgagtttcttccactgtgtcgcacctaatctggcagactgcgtgtgagattcagctcgactcgagcgcgcgtccgatcgatcgactgactgacccttccaattggtcgcgtaggacggccctattgaatggcggctaccaggtctctcgatctcacgcctcggcaggatctgtcaagaccgacgcgcccgtcgaattcgttcacgatattttccgagcgtggatcgagaagaaccctgtcagggaagacaagatcgccgccggatcaccttcaaaccatctattacaaaagaaaaagacgtgagtccatgctggcgctacacctgcaacagggtgatggctgatacggtcgaccttagacacgaagtcgattggacgccgaaccctggtcttgcaaagttgatgaacaaggaaaagctcgtcaggtatcagatcaatcctacgaagaactggggtcctggatccaggccaaagaacgtcactgcagccgacgagaccgctgctgcaccaactgcatcatcaagcgatgtccctctgggcgacatgactggcacggctatcggcggagtacaagaaattcgagaactcggtctggctgctgatcctagtgaatacccacctggtgctgaagtcgcggaaccgggtgcaatggcagccgagacgatctcgacgacggcaaagcggtctcgagcagaaggcgaagaagaccgagagggaaagaaggtcaagctggacgaggaggacgaagagtccgcgctgaacatgtaggatgtatgtttgaattggttgtataccatcgcttcgtcgaccagccgctgccgcataagcgcgatgagattttgctcattacgaggacagtccgatgaacctcttgagaagatgactacaacgcccattgagaaccgtactgcatagcgatatcatctgttcgctaaaaattacaaaagaagaaaataaccgccgttccaacgacgtggaaatgtatcacaaccgaaaagaccagtcccatgtgcacctttttgccgacccgttcgagttcgagtcggtggtcaccatctatcttcctcccgcgacctgcttgatctagagttggcctatacgcctgaccatctggtccttcaagttcgaatctatcacgtataggcatgcaggaatgagcgactggtagcaaggaggtcttcatcacgcggacgagcgacatacaggcgttcatgatggtctgttcgttgatgatgatatccgtcgtgtcggttcgaggtcgcgacacccgagatgcgatagccgcgccatcggtctccaagatgatgctgtggagtgagaacagaatccgttgaagaaggccaagggttgttgtttcccatgaataggcgagatgtaatgcaaagaagtatacatattagcggcctgtgtatcaggttccgcttcgagcgaggactaacccgtcatcgatcgtctcgtccgcagccaagagcaccatatctaagccttccaacacgctcctcttctcaacctgacctctcaggagcaagctgacggcatcgttgaaagcgttgagcgcgaaggagagctgcacctcgttggaggtggccaggggtccgacgatgtggaaatgcaggtcggtggtagatttcgtcaaaaccaagtgaggagggagcgggttgatatcgcctatacaataccaaaccgggtttagacacgatctggatgagacatagcgggatgattcttctgcaaagtgacgtaccacctccccttttcgtcttctcgtgcacgctcttctcgaaagccttttgctccttgagagaggtcagtccttgaggtcctggtgcggaacttgatgtggaagcgttgtgacccgaagtaggagcagaatgaggtgcatgatagtatttggccatcacccgatgcccatcggcatccaggatcaacaaggcagtgattgagtagagggtcaagttggtctgctcggaacgtcagccatatcagctcgacctgccaaggtgtacgttgacgttatgactgcttaccatttcagtcgttactctaagttatatggacggctctgatcactcgccttgtggggagtagggtagtgtcgatggcaagcagatgtgtatagaggtggtcaggtcgggtaagggggtcgctagctaggtgacgctcggtcgcggttggatccgcgaaatagggaatccacgtccacgaccgaccaagaccatacgcaagcaagcaacactttaggtacgttcaagaccatctccatacatccgaccctgcatcgactgaccgattcatacaagattctacgagcgactattcactccttagctcaacgatccacgcctctcagcctcgtcgggaatcaatccgtaggacccgtcacgaatagttcgcgtgcggacgtacaaaaggctggatacagccacgtctcacaaacactcccttcgactatactattaagaaccacaagaatccctcaagatggtgagtactcgacggagcatacgagaattatcgagctgatctatattccacaacctctcagccgatgctccttgacattaaggtatgtttatcaaccaaaggcacgttaccggtcgcgcaagctgacctcttgcaacgttcgctcgagcagaaagtcttgacgacccgtagcgaccgagtcaaggcccttgactttcaccctacagagccctacgtccttgctggtctctagtcagtagttcgatagccatagacatggcggcgcatcgcgagctgacccgtcccgggattgttgattgattccgacgctatagcaacggacaggtcaagatctggaactatgtcgacggctcagaggtcaagtcgtttgatgtatccgaggttcctgtcagggccgtcaagtttattgccaagcgcaactgggtaagcatccttcttcaatcggtacacatctcatgacgagctaatcgagaatatgtcgtgttgcaatctcgtcagtttgttgctggttcaggtgaacatcgactcgtcggagcatccctatcggacgacagctgacgtactaccgctattctcgttgttccagacgactttatggccagggtctattcgatctcgactggagagcgcgttcacgcatggcaacctcacgaggattacatccgaagcatcaccgttcaccctaccctgcccatcatcttgacggcttccgatgattgcaccatcaagagctgggactgggacaagtcgtggaggtgtactcaggtatgttcaagtcacggacagaggcagatccgggaacagttaggcttaccgagaaaccgatacaggaatacaccggtcacaaccattacatcatgtccctctccatcgtgagttgacccgagtcgcccattcgcttcggactatgttcatgcccttcccccattttgtagaacccgaaagatcctcagattttcgcttcggcgtgtctcgatcacaccatcaaagtctggtctctcggctccccgacgcccaactttaccttggaagatgcccatcagaagggagtcaacagcgtggattactatcacggaggtgataagccttacttgatctcttgcggcgatgagaggtgggtcaagggcctcttcgaaactcgttcaccattactaatcgggctgtccggcgcttgacgagcagaaccatcaagatctgggattatcagaacaagtcttgtgtgcagaccatcgattcgccggcggccaacatctcgtatgccgtcttccacccttctctgcctctcatcatctctggatctgaagacggtactgtcaagctctggaactcgtcgacctacaggttggagtcgaccttgagctacggcttggagagatgttggtgtgttgcgtacaggaagggaggaaacgaagttgctctcggttacgatgagggtctcgttgtactcaaggtcaggccaggatcgacgaatacttggtttcgagttcgaagctgaacgatccccgtcattctagctcggtcgagaagaaccctcgatgtcgatggacccctctggcaagatcgtctacgccaagaacaccgagatcttgactaccaacttgcagtctgtcgctgatgacgtcgttgctgacggtcagcgattgactatccagcccagggagctcggaaccaccgacatgctgccccagagcctgcaacacagtcctaacggaaggttggtacccagtccacattcgtagttcgtatgacgtatggctcatcttctatcgttcgatctcagattcgtcaccgctgtcggagatggagaatacatcatctacacctccttggcgtggcgaaacaaagctttcggaaccggtacctcgttcgcttgggctagtgattctaacacctacgctgttcaagaatccaagaacaagattcgcgtgtaccgaaacttcaaggagaggccgggcttgatcaagggtggagccgctggaatcgccgttgaagccgtacacggtggtactttgcttggagctagaggaagtggatacgtgcttttctgggattgggagactggtgaattggtccgaaggatcgaggtcgatgctaccagcgtgagtccgctcgacacgagtttgttaagaagatgcgctcatctgtccatcgttcgtacatagatcacttggtctggctcgggcaacctcgttgcgatcaccagcgcagattcgttgtatttgctgcagttcgaccgggaagcctacaacgaggctttgaactcgggcgcccacattggcgacgaaggtgttgaggcggcgtttgacttgatcaacgaggtcaccgagacgtacgtcaatgtcgtcaatgagcgtgtgtgcaggagctgggaactgatccaagtgtacgcatcacagcgtcaagacggtcaaatggatcggagattgtttgctcttcacaagcgctaccaaccgtctcaactacctgattggggaacaggtctacaccatcaaccactttgaccagtaagcgtctcgaggtgtttcttcagcggcatctggctgacctcgttgcaccggtcccaggcctatgtaccttttgggttatattccagctcacaaccgtgtctacgttgcggacaaggacatgggaatctttagcttctctctgtctttgactttggtcgaatatcagaccgcaattctccggggagactacgatactgcaaacgagctcttgcctacgatccccaatgaccagcgtaacaagattgcccgattcctcgaagctcagggtaagccgacgctaataatcatgaacataggtcggtttcgtgtagatagctgacatcaagttgaaacagacctcaaggagatggcgttgcaagtcgctactgatcctgatcagcggttcgacctcgctgttcagctcaacgacttggacttggctctcgagctcgttcgagccgtgcccgaggttggttcggaaggcaaatggaggatcgttggtgacaaggctatggatgcttggcgaatggatctggcggaggagtcgtacagcaaggcaggcgatcttgctgccctcctattgatctacacctcgttgggtgatcgtgccggcctcgaaaagcttgctgagactgcttgtgggtgtttacctttatccgataaccttgggtgtggctgatccagtcgtgcttacttctgagctcatagccaccaagggacagcacaacattgctttcacttgctaccaccagctcggggacaccgcgtcttgcatcgaactcttgatccagacggatcgggcgcccgaagctgctttctttgctcgaagctatgctccgtcctccgcttcatctgccgtcaagagctggaagactcagttgaacaacagcggcaagaagaagctcgccgaggctttggccgaccccgaggagaatgaggacttattcgatgagggttgggcagaggctttggcccgggagcgaggagaaagctcgacggctgaaagttctcagcaaaacggttctagcgagccggctgaagcggttcaaactgctgtggagactgtcacgactggtgccgaggcggtcatcgataccgttggcgatctcgccgagaaggtcaaggaggttgtcatcgacgcggtggagcctgcttcggatgagcctggtacgtcttcacaggctcgcctagatcgaaggcccacgctgatattgtaatacctcccgtgacaaaacagatgacgactttgtggacgctggagcagccaccacccccgtggaggaggaagctgaaattcctcaagacgaagaagagtcgacaaaacccgaagaagctgccccaccagcatcgactggcgggaagaagaagaagggaaagaagtagacagcttagacgaggagaagaccagatgactatttgtaatgcctgtgtcccgtgtcctgtttccttacatccaatggatttgacgatcgcgttcaggttccgatacatttgcacccgcggtcgaaataaggtttagtcaacaacgcagtcgaagtctttgatgaggcactcgcggtgtgtcataataaccagacgttagatgcatcgatggctatcagatcgctctcattctagattgcttgcgagacatcagtgaatgaccccttgtgaatgaagctgcttcgcatcctgcagaagcaccttacgattgaactgggatatcgagtgagatttagcgtcattcttcactcagtccaaccttctcttcctattgcaatcttgcacatgtaacgccgtcttgcgaagctggaatagtggtgaggaatccactgaaggcgacaacttccacacattctgacgtggcgaacccctcctgctgtaagaattcacagtcggcatgaccatgggctgataacaatctgctgccggcaagcggataatgactggtgcggaggacgtccggtcaaagcaccggccgacaagtgagctcgataaggccaattccattgcaatccctggccccgagtggcccgatcgcagaccgcctatagggattgatggccaaagtcagactcataaaacatcgggagctggataaaacgccttccgatatctggaaacccatacccggtgcttcggggtggggcggaggatagtgttcgaagacaaacactcctggcagattccaataatataagggtgcgtgggatgcaagcattgcggattttaatatcccaagactctacaggggaggaacctgtcgcaaacactccgcagtggcgacatttgcgaatcccgtcatgcgaatcgactatatggacaaccttaggcgagattcagctagtcactaccatgaatgaaacgaaaggcggcgaactcgttgtcccccgttttttcaatgtggcgagtggtcttaagtcactattacaacgcaaatcacgtcacaggccgagctctctttgaggccggcaatattgaatgactcactaggcaacctcgtcaatgtaccctcgaaaggtctcccgatctcgtctagtgataagatacagcgacttcatttgcttaccagatgtgccatgaggatgccgtccgccgtccgtcttttcagtgagatgccacattgacgtgatttctaaagtacatcgcgtccgcgttgcaacttgctgaagactcgctgaccggtctcgccttctctgctaccgcgttgctcgcgaggtacactcctgcaaaaaggtaaaggacccagagtaagctgaaggattgttaagtctacgaatggccacacggggagtccttcgggaagtccctcgtgacacttccttgcaggtccgcttgctattacagcgattgtttttcaatgaacgtacttccatcccggcctcaggaatcactcgtgtttcaatctggcgtggtccccatgttattgagaccgataccgttgacatggggttactcggaaatcgcacgcgatctggaagctgaatctatcgtccctcatcacgcggatcgtctgagaactcacagtgtcccgtgatcaggcgcatgtcggtgaatggcgtttgcgagacgattcctgtttgtagggattcaccacctcgtcattacccctccagggtggacagtacggttagtgcagacggactgacgaggatcgagcgcgtcagtgtgggacacttgaagctcggctggaccggcacggcttcacatgggaccaaaacgtgtcggaaaagaggcgttcatagtgctacataaggaaaagcttccgtcccacccgatgtcagacggtcagacctctttaggagtacgaaagacgtagctcccggagagactgacaggggcgtcgaattgaggagcagcagactcacaccttgccgtttgacggacctaccgttcagcgacgtagagtcgtcttgaaaaggggaagctgaagccgtctcttccgctactcgcagtcttaacgctctcgcttgtcgtgacttcgaactcccaagaaaaggctctgtggcttgtcccgaggtatggatggacgcttgagctccttgtgcgatcgaatgatgtatgagtatggtgtaatacgataggtatactgttcgacaacggtgccgtgaggaatcctgaagatcacttagccgtaatgcactatgtcatctccttcacgtcgattagggcgagcgacacggagaccgaaacataagagccttaacagtcagcccctcatcctcagggatcaccagtttcacccgggctactcggccttcattcggacggtgccggtggatatccctagtctcgcccgaagacgacgacctctcggcgtcgttgaacagtgtcgcgaggttcggactccctcgacatgatggtcataaaaggcactaaactagatagatctttcgccgtcacgtcgcaaaaatttacgaacgacatgttcatgatccaatttgtgaacctcacgactaacgtcgctatacggcgtcaaacatatactacagtggagagtctaccgcgacagatatccatattgcccaggcagagtcgcgcatctcatcgagaagcgaacatgtacatgtgtctgaaacgactcgagtaccaggcttgggggcgacgtcgctgggagacaaaccgtacagcgcgttacaaagacccgattgcgcaaagcaggtgaaacgccgtgcgagaggtcaggccttgaaagtgcctgagcgaggtatttgcttccgctcaagaagggacgcgggtcggaagcgcgcttttaggtgacacccttattcggcagggtgaccagagctggcaagtcgagtatacttcgatctcgtttctggtgtcgtacttgctgcatcccgaacgatcgagaagagtcagccccaggtcacaacttggatccttcacatttgcttgtctcggtgtcgatgtcggttgtgatgtgatcggtgacggtggttgatggtgatgcgcttggtgattagtgtaactccgatcgagcaaaagcggcgagggagagaacagaggacgatgcgcgcgtgcggatgctggcggacatgttgccatgattttcaatctccttgacgcgtcagtcgactcgccctcgcctcgttctgttttcgccccggcgccccctcctcctcctactcctcctcctcgtcgtcgtgccagcctgacctctctctctctctcaccttgcttcccgccaaacgtccaagtgacctctgtattcatccacgcacatacgtcttgatcaacacgacatccaaagactctcttctttctcaggattcaagaatcaaacttgcatactcaaccctagaagatacatcatgtcggtcggtaagaacaagcgtctctcaaaggggtacgtacaggatcagcaatagctgcaaagcagtcgatatcatcgagggaggaccgcgtgatctgactggaccgtctgtcgaaactttctctttctcatcatacagtaagaagggtatcaagaagaacaaggttgatgcctttggtgcgtacaagaacgaggattgcagaggcactcgtcgaatgtgcaactaattacgaggtcgactttcggatatacagccaggaaggactggtactcggtcagggccccttcgatcttcgaggtcaagaatgtcggtcagactcttgtcaaccgaagccagggtttgagtgcgtcagattcgagaacccgtagagaccaaagggaacaaccaggctgatgatcttgtgacccgtccgctcgtctttgtagagaacgccaacgactccttgaagggacgagttatggagttctccctcggtgacttgaacaaggaggaggaccaggctttcaggaagatcaagctcaggatcgaggatgtcaaggtgcgtttttatgctcagccatgacaggattcatgttccatctcgtctcgagccacccgctgacctcgccgccctacccgttctcctcggattgctatcgattaggacaagaactgtctgacttcgttctacggcatggacttcaccaccgacaagatccgatctttggtccgaaagtggcagtccttgatcgaggcccacatcgatgtccgaaccaccgatggatacctcgtcaggctcttcgccatcgcctttacccgcaagaacaggcagcaggtcaagaagacctcgtacgctcagtccgcccagatcaggcagatcagggccaagatgcacgagatcatgaagagggagtccgagtgcgagttgaaggagttggtccagaagttcgtccccgagtcgatcggacgtgagatcgagaaggccaccaagggaatcttccccctccaacacgtctacgtccgaaaggccaagctcctcaagtcccccaaggtcgacttgagcaagctcctcgagtcgcacggtgagatcgagaacgtgagtctcggctagcatggccccacgtgcaaaaaccgacgagtgaaggtcactgagccattgtctttacccgtcccatatagtccaccggtaccaaggtcgtctccgactttgtcgagcccgaggtcttggcttccgtctaagcgtcttgcatcccaccaaatcaaaaagggaatcaagccgtcgaggatggagaggaggagcgtcatggtctcagtccgagctttgtgctcccgcggacggtcagagggctacatcgtcgttcgtatacggagacggagcggtgccgattcggtccgctcgtctctctgtgcccggcgggtctcttctttcgtgtaatcttttagtctggggacgcatggttagaactggggttatgacattttctgcacttcaaatcgactttcagtttccaaaccgccatccataccgttcagtctgtgtagagggtgttcatttctcgccgcctctggtaatatgccgcttaccgacggaccgattgcgtgattacgccgggttgatggaacggggcttgcatttgtcgggcttgcagcaatctgtccattttagggagctcgtcatattgcgacatcggtcagcaatctgcacttggtgactagttcgctagatcgctatatcatagctgtgcctcaatactctctcgccaattggtcgaaactcagatctgccaagttgtcgctctgtagatccatcacctcctttgccaggcgaagtaaacgatttcccgaaatgtctttcgaaccgccttacaagtacatctccgcctctgagctcgccgaaaaggtcaaacaggccgatcctcagcaagtgcaggtcatcgatgtccgggacgacgatttcgtcggaggtaacattgtcggggccaagaactcgccgagtggtgcgattcacgagaacgtcaaggcgttggtagaggagaacaaggacagtgagtcgtgaacggcttgacaagatgcacggagggagagccgttatcgctcatgacaatgaacgccgacttggagccgagtagagaagacgatggtattccgtgagcctgacggtcctgttgatcatcagggcctatactcgaaagctgatgattctgcctttactcccctcagactgcgccctttcccaagttcgaggacccaagtctgctcgaatatactccgagatgcaaaagcagctgcatcccgacagtcaacaagaggtactggtcttgcgaggagggttcactgaattcgctcagcagtacaaggtgagactaccacgagacatcgtgtcaagaccatctacctgaccagagctggtgcccgaattcagaacgaccccgccttggtagaaaaatacaacaggtgagttttacttcgtgcgatcccgtccggcactcatctagaggcgctgaagttccggctgtcgaaagtatgtaccatgactgaggcgactgccgggcaacggcctcgagcataggatgtacaaaaccaaaccgaagatgcaatgggcttttcgagtgaccgctacataccataatacaacggccaattgtcaactgcggaccaccttactaaagctggattccgatatttctggctgtctagaagcagtatattatggctagagattcatgaacctctgccaattgttttccaggcgcctgactacgcccagcccttgaggctcaaagtcggcttcgcactgttcgatttcccatccacgacacttggctatccacacggtcgctgcccagactcgctttgtactgtcttgaatgaggtgtgtgtcgctctcaaccaggagacgcgaaggatcagctgcccgaatgaggtggggcgtgacgggcgtgcgaccggatattgctatcgaaggcgataggaagaggttggggaaatgtttctgtgaagcgagatagactgctattaagcaccttttcatcgaatgcgtgaagcgacctgcagagacttgcctcggcatccacccagctctcgacactccagccgccacaactatgtacgtccacgttgacccggtcgataaacatcgctccgtgcttcttcttgaaccgtttcagaaagtccagcgtggaaccctgggccttgacactgtgcagactgacgttgattccgagttcgacggcgagatccatctgcagttccagcaaggcgatctgatgttccatggacggtcggaagggggtcaggttcttgctcctcgtgatcaactcgggttgattcatcttcttggccatttcctcttccccagaagtagcgatcctggtttcagcatcggcaatagcaggagcgggagcgggctcctcggcgtgttccccacagtgatccgccttgtgaccaggaaaaggcactctgaagcttcgatccaagccgacttccccaatcatgactaaactccctcgtttctgagcttgcacggcatgcgctcgcatctgctcgatcaagggttggaccgagatgggttctggcaggtcgggcagtatttcgtctagaagctgtctctgtactgcatagctcgtcgaagcctctgaagggagaaagatgttcgagtaatgatcatccttggatacctgccgatctgcatctcctagatggaggaggtggcagaaccatggatgataccctgacggtgtaacaagaacaaagttcagttccagtaagactggtatactcccaaggtgcaatagcaagctcaccgaaacaggcaatcacttcgggtccaggtcgtcgacgtcgtttcgattccctctccctgccgtactcgtcatcatcccttcgaccatggtcctcagagaagctggcgacgagttcttgatccgtggtccgtgtggccatgcttgagagtccgcccagtccgacatcattgacggtctgctcggtaaaggggacgtcggtcgggtgacagtgcgcatcggttactaggtagcgcggaatgcaagatcatgtgatcgattccgatagatgacgatgacatggtccccgtatgaggcggaataagggtagcagaattgagacgggaagtacatgaatgtcgacggtttgagttagttcatccacgccttgatgagagggacgaggtcccgtgaccgtgaccgtgaaagtgagggacttacgtcgtcgcaagacctgactcgagggcaattcgatggtttgccaatcgggcggtgcgtcatcactgctacccgtcgacatggtttaatcagactgctatctatggttgtaaatgagtgctcgtgttgtgacgttggggtcgaggacgtacaggagcgactcgcaagtcatactcggtgattgttgaggagctgaggagaggaagcatgacgcgagggatcccgcgtacatcgacctcgaagaagcccgcaaaactcgtcatcacactctaggtcactgcacgactgcaacaatctgctcgatcgtcatgtgtatgtagacccaagaacggccaagctgcacagtcacgctccggagacaccagctgatcataagaacagactgacacatcgccggtaacccggctcgtcattctcttgtccttgcccttcaattgttgtacttgacctgtacgtctcagggcggcgcggggagtcgccccgaagtctcacatggatatgtctcgatcacacggaaaactccccgagtctcggtaccggccagaccccacctgcagaacaaagagattcgttgcgtgagatgcccagtagcgagtgaacgtatcactcgcatcattgccgttcgaactggtcgacaaggggcaacgagaccaagacctatctgttagcactaccatttggggttaccttggcccggttaatcggaccttggccggtaattcgggacggcacacttctgctgtgcatgatttcgagctgttcccgggttgaatcgttcacaacactgccaaaaggtcagctctgtcgatctcgaagatcgtcgatcacctgccacatcgtccgggtcgtaacgaccgagtcggccgtctgtcgctcaccgatcgtccgaagacaacgtccattccgttgaattccgtatgaagcagtctaggtttgcaaatatgggttgcatgattcgttgggctgaggggtcatggttaacgggaatcttgtgacttcccccgtgaaaacgatcgaggacgcccccttcacgcctcttctggtgagcttgttctttccggcgcacaacgaaaaagagggagggatgggagcgaaccttggttcattgcgatcttctcaccgcgagtcgaccaaccctgccttccacgaagcggtgatcgctgtgctgaaggtgcggttccgaaatccgcccaaccgatcatctcgggcaacgacccaccatagttcggccgcggttcactttctgcggctagctcggtcctgttcagggctgagagcaggactggccaatcaggtcccgtgcgtcagcttcgcccacgaaagtgtgatcatcatcatcacgtcatcatcgcatcatccgtcgcttccgcgcgtcccggtgggattggggagtcaggtccagtcgtcacaagggtaaaataacgttcaggcgccaacgaatcagaatttgatcgcgctcctcgtgctgaacgactcgacggcgctatgtgatagccaccgagcgggtcgtcgtcgcccccagaacccccttcccctccacacgccctcgctgttgggacatcgtgacacgaaacaggattcacccccggtacttttccttttcgcccatggttctcgaggccgcacgtcgatcgatgagcgatatgggctggcccgacaatgcccagatgacgtgcgatcgagtgaacagctgagctacgtgcgggaaagaccaacgttgtgtagtcgccggacgtcagagccagagctgggtacgatgcatgatgcgtcggatgacaacaagtgaaaactcttgatataccgacccaggactcgtccaggccgaaccgttgatatacttccatcttcttggctataccccgcccccacttctcgctcgagagttgacccagagcactagcctactactactaccagcgaatcgtctcaatcaacttccgcgattcggaacagcctgcctcccaagactactaccaccgggaccactcgcaacaagccctagctcgacctcgagatcgccatacctgcagatcccgaccacctaagcaatctagtcgctcgacattcgactcgacatcgacctgcatcgcgcaacctcatccagtcccggtccgataacccgacggcgtgacctctcgacactcgatacccgacctcgcgacccggtcaagatccgactcgaacccgattgattcaccctggtttgacctgatcctcttcgcccttggatctgtgatttccattttacctcacctcgtgagtcgcatgaatcgatctgtttctagcctgttttcgatcgggacgtgtgcgggatcaattagaccacagcatccaggggcagtgccaattatctggggcaggaagggagggcaggggagacggatagagtgtgtccgcgccaaaaaaagcgccttccatctcacacatcggtcgcctctgggtttgctcgagcccgaagatctctctcctcgacctgcaggcatccagctgtgggcctagcctccaccgatttgcacgtccgaacacatcgacgagcacacacgcacactagacacaccacacacagacgcttctctcttcccaaggggagagagggatacgaagtccttcttgtcgaaatgaaaagaaggcccgaggttcgcagtacccctaaccctcttcccgtcgtctccctcccctgccgtgcttcccccctgcctcacgcgtgatcttcggtttaaacaaggaaaacgcgcgatttcggacccgttcccgcaaacctatacacgcacagggaccgtccaaccctcgaccggttagaccaccacacatcgtacttctaatcaccatcgtcgtacatttggtcgaggaggcctagaagattgtcgtgaaataaaccgtagctctccaacgaggcggcgatccgctctgacgatccaactcccgcccggtcccgcacttctaccccttcgctcgttctttcgcttcgtcgcgtgcctgtcgaaccgaatctcaaaccccgcgatgctcttctcagctcgacgacctctttgaacgcaacaagcagaggcagtcgataattcccatcgggatatccctcaacacatcgacagaacacatcgatcgttcagtatctcgaaacgagatcgccctcagctacgaggtgagtagcctcggtagacttcgaaactggggcgaggtggagctgactatttctgggattctctcctcgatacgatctggaccagcacgtttcttttggtcgagacctcgtcaactccccatcgaccaggtgtagcaaccatcacccactctcgaattccatcctcgacgccaagcttcgtcgccccactttcgagctgatgccatcctggaagattcccgcggtacctggatacgattaccctgaccctctagacgtgctgaacgacgaccatctgctcgggaaagcagacgacacccagtccaacaccaccaccaccaccaccaacaccaccaacagcaccaaaagcaacaccaacaactcgagcagcgtcatccgcaacaccggtttcaacgctctggacaaaccggtcagacaggcagagagaagtttccacctcagtctggggctggcggatcctaggttgcagcaaggctctcaacacttgggcttcggttcgctcgacgccgattctaccggttcgttgtgtgagcaagagcttcggagtgagctcgaactggcgatgatgacggccgagctgacctgatcgtcctgtctgtcttgtcgaaacgtagcggaactcctcaccgcgactcacgaacatccatccctctcgttccgacccgcactcaccgtgctacccacttccaacaactcgcgtttcaggcaactcttccagcaaaagatggccgcggaagccggtcgacaacacaacgagcgtcccggcgctgcacctgtccaacaagaccagagtctcgagcacgatcgaaacccgagctggccacagaccaactcgatgtcgtcagggaacagcagcaacctcgccgtcaacactcaacaggccgaggagatggcaggatacggtcgagaaggtgatagccagggggacctcaccaggcccgccacgtcggatggcgtagtatacctcaagagccctgcacctcagccgcaggtccaggccggcgagcgtcacccggtgtctgcggatgccaacctccccgtacctctgccttcgtggcagaaccccatggcgtcgtcatctggctaccgggcgcaacctcagcagtcgccttattaccaacgcatgcttgctgccaagctggctgccgcgcagcaagaggaccctctcaacgtcaaggatgagagcaacaattacatcccacctatgggccaacccgacatcgcctacatgccttcaacatacagtccgatgtaccaaatgttcagcaacggtggcggtctcgacaaccactaccaagctcaacacgcgccccacgggcagaacgagccgtggaacatgcacaaccaacaggctcatcagcagtcgcagcactacgggcctggatccgaggacgccggctacctaggtcttgtgaataacaacagtagcaaccacagtgggagccatcatggtggatacccggatcagtacagcgcccattccgctggaacaccgtggaaccagtactacccatcagacggttccaactctaggaaccctcaagggacgcattcccaaacaccccagcccagcgcgcctggccagtggaaccgccatgatggtaaactcgacggtgaaattcctcctgccgtcgaggattggatggcagcgtggcctcatatcaagaaccccggccacgaaccgagcagaccgacgccgtcgtcgtcttcgcgaaaaaaggccgacgcggaacccaagcccaagaaggacagcagcaatgtttcggtcgctgccagcaagggaggtgatcagccgaaaaaggcagctttggcttgtcacttttgccgaggcaggaagctcaagtgagtggcgggtcgaacatgaaggtgatcgcaaccgtaaactgaccaacgaccgcttaccttcaggtgtgatgctgtccgaccgacctgtgggcattgcgccaagcgttctctcaactgttcctacgacattgagatccgcagacgtggaccgggaaagagaaagaaggagctcctcgcgcagcagcaggctagggccaacggtgacccgtaccattcggacgataccaagaacggttccagcaggaagcgcaagtctggcgacaccggtagcgatcaggaggatggcagccaatccgactcgatcggactgcactccggcccggatatgaggatacagccatcgccttcccacatcgatcagtacccgcaacaaggttactctgggccccccatgtctgcgacgtatgacgcttaccaacaacaacagcactacagcaaccagatgtaccaggccaatcctgtggatgcctatcaccaccagtcgtatgctgctgcgtaccatccccatccccagtatgacgccgtctcaaacgacaggagccgaccaatgtcccacgggtacgaagtgctcggcggtagcaacccatacgcacagggctacatgggcggacgccccggaggcgccggccacgatgaacattcttcaaagagagtaaagctggaaggctagaagacctcgctgagacacggacgatagcaggagaagagaacagaaggccggtcaccaatctgcacatcagggtgccgagcagagtgatatattcagcgtttcgcaagaaactttcgatttctagcccaggcctcaagacacgcgcgaagcccgcgcccatccaatcatattaatcagccatcggggaaatttcgacctgggcgtagtcagatccgccatcttttcgttgtatgcgtttagtctagtctgggcagtattttttcagcatcgctttggtcccatacactacaccccatgatatggatattggcattgattgtttacttgctgttctcgatcgcgaacaaaccaaaagcgcgaccgcaagcgcgaatcttcggttccgagcgaacccgcacaaacgctggctctgcccgttccgatgatggggacgtcaatgtcaggagatgatctaccttgcaataattatcacaacgtccatatcgtcaatctactcaccaaaacttcccaatcacactcacctctaccatgttcttccccgtcgcccgaacctccctccgtgctgccgccggtgtcgctcgtcgaggatacgccgatgttgccgatggtgctctcaagttgagcttggtcttgcctcaccaggtgagtgtctgtataacagggaaagagaggagggcatctagacctagcgactctgagccgtacggatgaaggacgaaggatgcccgagtcttctggccacctaccgaagtctgagcggcacttgtcaatctaagtatgtcgactaattatatctggtgtcccgcatcttcaggccatcttctcgacccagggtgtcacccaggtgtgagtgcagctcgcaagaagacccctgacattgattgttccaagtgctcactgccgtctttcattaccttccaaactcatcagtaacattcccgctgcttcgggtgacatgggtatccttgccaaccacgttcccaccgtcgaggccctccgacccggtctcgtcgaggtcatcgagtccgctggtacctccaagaagttctttggtgcgtctctgcctcgtggacggaattgacaggatgaattttgactgacttgagctcaaccttcatatcgtagtttcggccggtttcgctactgtccacgccaacaactcgatgaccatcaacgctgtcgaggcctacgagttggacaagttctccccggaggttcgtagctatgcaacgcatttttagccagtgcacttaccggaaaccctttcgtcattttcactcctatcctctctcgaatcgcatcaccacctgaatcctctcaacaatctcttacacctcgaccgatcccaaacaggctgtccgagctggtctcgctgacgcccagcgtgtcattggatccaacgctaccgagcaggacaaggccgaggcccgtgtcgaggtcgaggtcttcgagtcgatccaggctgctttggccaagtagagaacgacaacatcaaaatgtcggaaaagatcagatctctgatgagatcggaccgggagtagctgcattgtaacagggaagagaagattgaatagataagtcggagagcccatcagaccgtactcgaagtcaccctcttcatgtcgccgtttgggtgacctgttcacataatcaccgatcgcgattggtcatcgcctagttgagatagcatgcctgttttcaagggggagggcatccggccgatcatagcacatacaacacaaacccgaagaattggtacaaccgaagtaacaagttacaaccctgacattgtcttgcacagcttgacacaggcgatccaaccaagcagacctggtatcttttccgtcacttcgtctcaggccgtctctaccccgagtaattctgccaactctcgatcgatcttctggctcagacgtttaggactgggttgccgcacctccacctcagagaaagagtgaatagagctcgtggactgacgagacgccggcagtcctggtctcagagacggagattgcggtacgaccgggcgtacggtaggactattcagcagcgtgtttgctatcagcttcggattgcagatgtccagcgtttgcgcgtggcttctgagaacgtacgctttgacgttgttcgcgtcgtagcagtttggacacatgcaaccggtcccgtgtctcgaatgagggcttgtcgaaacgcgttggacggttgagccattagtcccggcgttttcgttctatcgaggacgaaccagcgttagtaacggtcgacggtagcagcaatcgtgataggtccaccttgcgttcaaagagaccgctcagtcgtctgactcgctcgccggctccttccgacgagcccttaccgggcggtgtcgtcggggatcccgcagtaggcactgggagccgcgaataatctctgggtagttctcgctcccttggtcgatgaccatcagctggtggtggatctcgagtcggtaagcgcagaggtgccaccgctggcaaactgtacggtcgggtattggctggtcttgataatcccgaccggtccgaggaaacgctatgagacgcattgggaggcgatcagttttgcgtttggactaccgtagcggtgaggttgcaagaccctttaccttgaagcttggctggtatgcgaccctgctactccgttctcgaattgcttcattcgatcagagacgctcacactcggccgatgtccctttcgctgctcctccccgcctggtctactatgagcagtcgagggcggctgatgctgcaacaccccgaaagatccagcgaccctcggggagtaagtggatctgggatcgaaatctgcgggcggtctgtcttgatccgtcggcgtgcgaggcgagagcgaagcggacgtattagtcgtcccactcgacgagaactgggaggcgatcgcgatggtagagggataactcgacgtccgactcgcagggggtactggcatggatctctttcctatgggtctcggtctgtccgagacgttcctctgcgtatcggacgattttgccctttcaccttgcccgtctgggcgcttccatttgaccgtttcctgtccatcgccttcctctgcccgatcgtcttgtccaggtacatcgtcgttccagttctcggctaccaagatcccggcgtacctgatctcaccgatcttgcccgcccctgctctcataccttcggcgaggccttcaaagaggatatgataggtctgacagatcgaagccgtcaaccttgagatggcgatcacatgctgcgtcgagatcgattccgaggtggacctgtgtatcatcagatccgtcagcgttcggtccggagcaggcagtaccgaatgctcgtatatcaaggaggccacatccaggacataccgtttcttattagcagagtcgtcgcataaccctgagatgaccctgaggtaccgttcatgggccatcccgatcccccctttgcccgctgctgaggatcgagaatcgttctgcaaaggtttctcttcgaaaggtggcagagtcgcgtgagatgccgattctgagcgcggtaccgtctggcttgaagcagtggcggcagtggagaaagattcactcaccggcggctgccatccttttatcattgatcaagatggcttcatccaaggcattatattcccgctggtcaatcgcggctgtcgaggtaagttcccgctcatccgatatttaatggaaattgctcacattgacggctttgctgtgtttataaagggtcgtctcgatccgatctagctctttggacgtgttctttagggtcttttgtagcacaagggaaaggtccgtggatgtgtttgagcaaggtgtcaaagccagggctggttcgacccgaggagatacattggaggcacaaggatcagctttcgtaatggccgcgcagagttgagagttgtttgggctcacggatagcggctggtaacccctcagcgttccctagtctccttaaagccgccccgagatccttctgacaacccgccaactgcgccatcaattctttctgacactttaacaaccgcaagacctcgtccactcgtttgatatcttcgatgacgcctcttctgagtccctcttgttcttcctcggtccactctcgctccctgtttccaatttgatgacccggtggtagagggaggttgaagtacccgtccctatctcggttggaaagagacagggcgggggaagccaacggtgatctgggaaccgaggagaacgactctctccgtcctgaaccagttggcgagtttgatctcgattcagaaggatgggcgaaggaaggtcggggtggtaagagggtcggacgtttcgagggagatgaaggggtcgagttgcgtttgaagctaaacatgatggccggagtggtgatgggtggtgatggtggtggtggttaggggtcctcgacacggtgagcgcggtatattatcttatgaggtgtatctattcgaccggttcgaaattcggacatcaagtgatcgcgtccggcgtcgacgctggtcgatgtcgaactatgcgacgtcattgcatcagatcgcatcccatcgcatcataagcgatacgtcgatttataagattcgatcagaacaacgatgggaagcgtttccactttgagccaccagggatggaaatcgatcatcaaatgcatctctgacgatctgacgattggtcaaactcctttgaaatccatcaatcccttctgaaacatccatcaatcccgcgccccattgttctcctctgtgcggatgcaaccgcgtcgaccgagtctttctcacgcgacctcccgacatgctgctgcgaaacgtctatgcacccggtggcctatgctccatctctcctcttatatggtcaggtaccacaccgagcctcgcaatccgagttatgggtcatgtaacagtcaaaacttacattaagcttcttgacagtgtcgtcttccagcgttgttcacctaccaactcccgcccattgaacatttgctgagcagtccggcccgcctcggttgattcccggccccggcgcgttgttgccccgacgagctgcacccgcgctagccggagggtgagctttcggtacaacctcatcccgaccagattcttaggggtaaagggtcagctggagaggctgggtatatagcatcgcgagccattaccgacgaccattcggcaagttgatacgacgtcgccatctcttcaaagtgtcatctcaaactttctgccctcaccaggaagaacttcaaaaataacatattcaacgagtctttaaacatgtcgacgaacggcaccacctcttctttccccaagattgtacgtccattgccccccctcctctctgctgtgcaacacgtcaatcttcgggtcaaactgattccctcctatcctctctatcctctcactcgtcggtgatctggaatcccatgacaaacaggtctcgatcgagacctttgtcccttccagcgaaggagctggcggggattaccaccgtcagaaaaccgaccactggagtgagtcccgctttcccctcccgagagcagcaaataagaaaaactaggtaggaagactgacccctcctcgactcgactcggcgctatgatcgctcgggaaacagtcgtccagggtaacatttcgaacccgatgagcatgttccctgaatgggcttcttcccggaccatctggggtatcggcgtcctcgtgagtctgaccaccggggctcttccgggagcattcgggcgtttgcaaaagagagacttgttctgactccatgtccggtccacgttccttgcaggggtcgttgttcgtcaagatcaccgctgacgacgggacggtcgggtatgcgaccggattcggaggacctccagcatgttggttgatcgaggagcatttcaagcggttcgtcgtcgggcaagatcctaggaacaccaacgtcatgtgggaacaggtgagtcgaagctttcccttaccacggtactaggacagactggaggacgacgatgagctgacgatcctacgggaatgcgtcgacccccccccccccccggtgccctcgcgttagatgtaccgagcgtccatgttctacggtcgtcgaggattacccatcctggccatctccgtggtagatctcgccatctgggacttgctaggaaagatcaggaacgagcccgtcttcaagatgatcgggggtaggaccaagcccgagatcccattgtacctgacggggcctctgcctgccgaggccaagcgcatgggattctggggaggcaaggtcagtacctgggaggtcgatacgaggttggcatctagggtctgactggatctgactgtgtcaacccgggtctcgcaggtccctcttcctcacggtcctcacgagggcgacgaggggatgaagaagaacgtcgaattcctcaagaaatgccgggccgacgtcggtcccgatttccccatcatggtcgactgttacatgtcgctcaacgtgcactacgccgtccaactcgcccagaagtgtatcgatgagaagatcaacatcaagtggtgggaagaggtcctcaacccggacgacgtggccggacacaagttgttgaaggagcggatgccgacgacgacttggaccacgggggagcacgagtataacaggtacggatgcagggagttgatcaaggatagggcggtggacatcttgcaagcggatgtcatgtgggtcgggtaagtcatgggtgtggtcgtgggcagaacaacgaggcagtcgtctgacccgattcggatgattccgcaccgtcgcacagcggtctgaccgagttgatgaaggtcaactcgttgtgcatggcacacgacatccctcttgtacctcacggatccggtccttactcttaccacgtgagtccaggatcgaccggaagtcgagcgtcaaaccgtatctgattctcctcctcgctgcatatccgtcctacaggccatcatgagtttccccaactctcaattctgcgaatacattgccaacagccctgatggcaaatcgatccacccttgtttcggggacttgttcttggacgaacctctccccatcggaggcaagatcgatctggacgagaccaagcccggtttcgggatgacgctaaaccccaaggccaagttggtaccgtacaaccagtttttccagagcaacccttcgcatacgctaggcaaggccgatcaggtgcagcccgaggagacgcattgagatggggagcggggtggctcgtaacgagttgatcgattgtccgacacggagctgtgaacgttattccatatggtgtagtagtattgatagtcgaatcgtaatgatacaccgaggcagggaagtaggaggagatgccgagagagtttccccgtgtttcgtgtgtctcggcatcgcgcgttcccggatgccgagtgatgacgcttcgatcaaaaggtggaggtcgaccgttcacttcaacctctccatctctggaatatatatatatatatatacatatatacaccgacccattccccgggctgcagatgccagccactttcctcctgagagtcgtagctagcacaaattattcgcagaacagatcgttcaagatgtctcccaccgctactcttaagctcaacaacggtcaacagatccccgtcctcggattgggatgctggatgtcaaagcccgtcgagggcgataacccagagacttacgagatggtcgtccaggccctcaaggtcagtcagcatcgggccatcttgaacgtcatgacagtggaaaattgactgatccgaccttcatcctcgtccacagactggctaccgtcacctcgataccgtgagctcatcttgacgatttcagcgcttcctaggcttgagcatcaaaacgagctgacctgctacctcccgttcgtgccctcttgaataggctgctggttacggtaacgaaaaggccgtcggacgagctgtccgggatagcgagtttgcccgttccgaagtctttgtcacgaccaagctcgggttcgaggggcacggcgatgtcgctgggcatttcaagaaatcgctcgacgcgctcgatatcgagtacattgacttgttcgtgagtgtcgagtcgactaaagactggggcgctcgagatcgttttcttcttgtcattgttgctcgtcaagctgacgaggcggtgggatcgtgattgtgatgctagttgatgcactggccacaggcgttaaagggggacgagtgggtccctaaagatcagtccccgacttttgtcgagacttagaaagagatggagaagctcctccaaggcggtaaatgtcgatctatcgggtgggttgaggtatttatgggtaggagggaaaaacacatcggctgaccctgcggtcggtatctcacccggatctcgggacggtatttgtagggtatccaacttttccgtgaagaacttggaactgctgttgaaatccaccgacgtcgtgcccgctgtcaaccaagtgagtcttggtatccctcccggtcagcatgtacgtcgaacctttgatcactgattccgacccgtcccgtcttgccgcaggtcgaggccaacatatatcacccccaatcatctctccatacctactgcaaggagaagaacatccacttgaccgcctactgtcccatcggacagcccaagcccggggtggggagcaaagtcctgaaggacgaactcttgctcgaattgagcgaaaagtacaagaaacccgccgctgccgtgagtctgcaaagatcgtctggacatccctcgtgcgtgtaaactgatcgatcgggcgcggcgctcgtcatatgaacaggtcgctctgagttggttggtacagcgaggtaattggtcggccgttcccaagagcgccaacccggagcggatggctcagaatctcgaggtgcgtcctgatccccgcttaggttgcgtgccaatcctcgtgcagaccgccaaacataacctaccgtcgtgtttgttccattctatagactttcaagttggagcaagccgactttgacgcgctgtccaaggtccacgagcaaccgggcaagttgatgatcagctgtgactacgggtcgggtgatgtcatggaaaagggagagatctttggctggtctttgaaggacatgggttgggaaaagttggactaagagaaaatcctctcgtcttgaggaatacgtaacaaatttcgttgtagacatgaacaagtgggtgtcgagtgagattttcgaatctcgtctcgtcgtccaagctgtgtgtacccgcgaggcggtgtgcggcagttgaacagcgagatgtcgattggagacacagctctttgcgccattcaaatcgcctggaagatggacccttgtccggttctgtcgactcttcccgagttgaagtccgcctataactcaccgcctatctactgtctcccactaccttgtctgatattgctgcttcgagtcgcgagtacatcgaatggtcacggtcaagttgggtggttggtacgagtttgatgaggtggcgggatcaaaattggaatctcgtcccctctagcctcagcagctggcatcacccacgcagctatcagccaagcacaagctcattcacccaactaccgtacactgtacaaacaaccacatactcacactgcacaccgaagcgtcagtaccacatacgtccatcgaaacaagagtacagtagctgtaccaagtagccggctcgctttggctcgaacgaaagacggcggtcaggactcggatcacaccaacacaacacacagcacgtcacccacgcacctccccactcaccacgctagcgagcagcccacagctcaggcccgacccaccatgccgggcttcttcaactctctgagctcgtactttagttcatcctctgccactggctctgtagacagggatggttccagtcgtcatgggaggagacagccggacgtcctctcctcgacgcgggatgccttttccttgccatcccatcagccaagatccgatagcccgggatacggatatgggcggggtggttaccaggacgattcccggatggctagtaggagtgagagtcctgcgttcggggaacacgttgggacgttgagtcgaccggatcgggccaacttgggggtgagtgtcagcccgggtcgctggtcgtcggaaacgccaattgatgagcaacgatggacattagggtctgagcgcaagcagttctcgtcacaattccatcgtgggcgggaatgctcctgggttctcttacccccctcaggcttctgagggcgggtatgaatacaacacttcatccaggcagatcgggtgagctccgtcatctcgtcatcatgcacatctatcctcgcaaacatgctgacgatcgatacatccctccctgtgaaatctagaactagctaccgcaacgccagtccttctggatcgaggtcccgaaccgaatcgtctggccccaacgccttttcacccaacggtcccctgatctactacccgcccccacggtcgacctggaaccgcatccagcgcgtcctcgccaataccgtccccgagcttctcgataccctcagcgggcccgtcgatccgctcaccctgacggaagccgagaacctgctcgggtgcgtcctgcctccctcggtcagggactcttacatctgcgtggacggccaagacccctcgtccgaatcgaaagaagggctcttcttcggactgacctttctgagcttggaagactcgctgagagaatggtccttttggcgccaggtcgaatccgatcccgcctcggggaacaaccccgacgtcctcgtcatgatgtcgtccatcccgtccggctggatcaagccgcaatacgcctgtcgaggttggttaccgctcatcacggaccgttgtggcaactacgtcggggtcgacctgaacccgggggaagatggaggatcgtggggacaggtcatcgtctttggacgcgagtttgatcgaaagtgtgtcctctttcggggagaaggggaaggaggctggggtcgctggttggcgggattcgccgaggaactcgagagcggtgaagggtgggagattgacggcaacaaaaagggcggagattccgggtcggacgaggaggacgacgtcggttatcagtcgtactattacgatgggaacgggtcgggcggaggtgattcttatggcgaagccggatccgcgctcaggttgacgggcgagtataaagggtggggtgtgctcgaggcttggtgggatcgaagcgttagacgttgggacgaactcgggatgggcctaagtcaggcggatatcaggcgtcaacaggaaaagattgacaagcgaaagtcggcccggatgggaggagagacggggccgaacgagttgctcggtctaggtttcggaggtatgaggctcgctaccgctggggaagatgcacaggtggccattccaggtgagccgtcttgacgtcgggacgtctataccgactagtcgctcatactcgcttgcagtccttaacgatcccagaggtctggtaccctcaattcccgcaccacaaccgctgtcgttaccaggtcaacctccagcatctccgggacccgagacggccttgttgatgatgccccgctcgccatcgctcagcaaggacgaggaacagatggagacgcccactatcagtcgaaacgattcgaacagcaacttcagggactacagctcggacgcccccgtcgcgcctacacctcgtcgactgatcacgccgtacagcccaaagacgtcgcctgaagcccacgcgagtggatcgatgcaatcgcagcagagtcaacaccacaactcgcagtcgacgacttatgcgtcatcgcacgacggtctgctctcacctccttctgcctcgccggctggcggatcgtcgtctcgacgacaacgtgtgaatctaccacctcctgctgccgcgctagatctgcctactcgcgcagacgtccaggcggcccaggcagtagccatggctgaagaacaaggactacggggtggctgggtcatgtcgatggaggcatctgctgcgcaaaaacctaccaacgagcgcaggcgaagcaatcttgctgcgattcccggtctcggacctcgacgagcctcgcagaactcgacagaggaggacaacgggatggtcgacattgacctcgagggcggtcggaaggaaagctttggatcgcccatgacatatcccgctgacgaatcgcccaccaaggatactttccagcgggccgtttcgcctctcgcatcgggatcgaccgtttcgaatacgcatagccgggaatcttcggaggcaacgactacgaccacggctcccctgcgcaccccagatcttcgtatccagaccgaagagacgacgcccaaaccgcgagcctcggctcccgactttttctctccccaacctttcgaggaagacgtcctggtgactcccgtggcaaagggcaaaggcaagggccgggccgatgctttcgacgacgtagcccttgcagacgagaccgagcccgtgagggccaacgagcgggaagacgcaggtgtggacgtttcccgactctcgatcgccgccgcgtcttgagagagacgtatctcaccatgatgatgcgtgatgacatgataacatatacccaggtatgactctctctttgtgctcgcatcggtacagcattgtctcgtagtgtgatcgccgaatgtacaacagaatgggtcatggcagggcgtgattgctcggtgccgagcggttcgtaaaagggaacgggtgaccgtccagaccagagcagccgcatcagtcgactttcatcggtgcctgcccgtcgttggagagcaggcccttgccctgaatcaaattgaaaatgaactcgacctagaagcatatcggaccgcggttatcagccgaaagccaccttggtcgaggtcgatctgtcattcaccttggtcgacgtctctttaatcctctcgtcccatcgctcggtcaggctaatgccctcgatcggcttttcgacgtgttcgacgcccaaacccccggctgttccttgcaagtcgtcttgatcctggctggatcgaccttcaaagtagatgagccgatcaacttgatcaatccaggctcgcagtctgttgaatcgtcgagaagaattagcatcacacgttgacaagctcatttcgtggtctgttctgaaactcgccgtttctgctcaatcatactgtgaattgctttgtagtcaaagtctgtccacttgcatcaatgcacgagatcaacgactcacgtccttgccatggcttcggccgcattaggagtcaggtccaacaatgcccccaacccttcaaacttgatgttatcgtatacctatcaagattgcgtatcacgatcagcgctgaaccccgactgcctcggcaacacagaattatgcttcactgaccttggcgcaagccaacacgttgtgctccatgaccgctcgatccaacacgctcgtcggtgctctcctccccgtgaccccttcctcgccctcggtactcgccatcaaccgcttgtccacctcgagcgtggccagctgatgctcggcgagttccttttcaaactccttgatctcctgcgttcgcaagatttggtccaggaacatcttgcgcaggatggatgaacgatgaggtgggagcgccgtcgtcgtcctgtcgtccctgtacaggttggccaagatcctcgaacgttgaggtccggcgggaccgaggatggcgcaggtcaccgcggccgagctgtacgtgtgcacgttacgtagatcccatgtggagctcgatcagctcgagtacggattcgctcggagcagtcccagttggaggaacatacagcatgtagatcctttcttcctcgtcaatatcgggaatgaagctcaattcgtggtacctgctcgccgcctcgttgaacctcctactgaaatccaacaacctcgcctgtcgcgtcccagaatgcataatacgatattcagctggatgccttcttgaccacttgctaaactcgagaaactcacctgacagagtttgtaggccagttgagtcgccttgtcctcggtcagatggatcaacaaggccgcccgtccgaaagtggtctgcgccaaacccgattccccggcctgtaccgatcacatgcatgtcagttggaagagagcctcgaaacagcaggcccgatcgcgatagaggaaagggaaatcgatcggcgtacctcgaggtagagcctgacgatcttgatatagacggccaacttgtgaaggtccgataatgacctgtcgatggaaaagccaagcgcaacaatattcagctcgtcacgcaattgtaccagtctcaccgtgccctcgtacaagcgagtggagaccgaaaacaaaaacaccgcttacctgttccccgattcgagcgggatggacgaaagcgtctgagctgccaattcccattcttcctgggtctcttgaatatgggagagcaagtacttgagtgtgatcatctgggaacacgagtgtgtagcggtcgacgtcagtgagtctgacttgtcggtcctctggtatcacgggggacgaggcaaggcacgggctgtggaaatgacctacttgatcttctccccatcctcccgggtgaatcaacgtagggatctgtgctacgagttggctgacgatcttttccctacattcttcgccggtgtccccttggaagaccgacttcccccgttgaaaccattctaattcttgttcgtccaggaccttggtcggatcgtttggggtagtcgaggtcgagtcggagttggcccggtcagtcgcactggcgttgccgttgttggtttccgtggtgctgatgttggtggtggtttgaccaccgggtggcctgatgagggaaaggtcgaccccgcttcccccacacaggaacaggacgaagagctccaacgcctgacgtccgacaactagcgggaccgaggacgaggtcaggaggtgttgagcgaattggatcagtgattccggatcaggtggagtggaaggatcaacgagtgtagagaggtaggacatggtcgagccgatcttttctggatgtgacgagctggtcatgaaaacgaggttagctttggggatgacgaatcgcttgagggattgcggtgtatgagcttacctggacgtcatgatcggctctaaagcggtggcgatggcattcggttcagacattttggacgagattcgagtttcagtcgtggccctgtgacgtgaacgagatcattggcagagtatcttttaccttttaagtgatctacccactcgacctggacctggatcgatatcatcgacatcgacaacacggcgacttccgacgggtcgaccactgtgaggtgacacggacattgatggatattttgtataacacggacatcaatgttatattctcaatgtccgctctatcactatgagatgtccgtgtacgttggtgacgtcagatcagtcaacccatcattacagtaccatacgaagattgttcaaccacttcctccatcccaacgtacattccacgtcgaccattgtcgtgtaacttgaaaaaacagacctgcaagcgagtaacggtagcgacatagccttctcgttgttcttctttgactttatcgagtcgaaataacaagcaatgacgacctcgtacccacccccaccttcccgggacccacctcctgaactccctcgacgacgcaatgtccccgaacccgtcgttcctgtcgcttcatcatcctcgtcgtctcatccggatcctaccgtcatggatagtatcaaggccaagcttccttttacgcacgaacatgatgatgacgaggacgattcgttcgacgtgatcggatactgggccatcaccgccttgagttggtcagtccctttcaccttgtcccgctcgaaaggccgagtgcggggagtcgactttctgatggcctttactgtttcaccacaggctcttcatcttgtcggtgcctcttctcctattcccccgccttctcgcgtttcttgctcagtccaacgacgcctcgttcaacctctcctcgagccataaaaagggcggacattacgacgacctcaccccgttggagaaactactggctcagcaactcggatggggttgcgttggagtcgccgtcgtcttggcttgtatcgtgagtacctaccaacccttttctttactggcccgcctgtctctactcaacccccgatctaactctcaacctcattcccgcacttgacagatcgccgcaccccacaaccctatcccacccttcccacctctctccacatcttcgactcctccttccgtcccctcgctcccaccgacgacgaccctccgtctatccatcctcctgaccatctcttccctcttttctctctcggcctttttcgtctacaacaacaagaccgtcgggtccgccgtcagcgtcggggtggggatggggaacgccatcctcgggatctggggcttctgggtcggcgtgttcgggttcggagggaggacgagtcagaagacggtgagtctatcccagagagctaggtcttgccctcttctctcctcggggagctctccttttttacgagggtctgggtcaggctgggacgattcggatgacaggctgatgcgatatctttgcagggggcggataaacggacgtcggcttttcctttgaagaacaagaatgcggcttccgtccagaagagtcgatggagggaagaacaggaacgtcgataaattaggaccccggaagtggatcgtctcttggccggcatgatggaccccacgggtgctcagtcgaagtgatcgagaggatgggtttcagagcgttttggatgatgatcttgtacacctaaccagcgggttcggggtgacgatctcccatgtatatcttatagaattaatggaccaggcgccctagcgagtgctaatatcatcgaatctcctcgctgaggaaagctcgcagcaccccgttccacagtttcgatattgacatttgagtaagatcttgttatttttctcgctgccgattgcgtcagagagtaccccttgcattcagaatggcagctctcaagtttgggcaggtcaagaaccgctcgacttggcaaaagcacctctcgaaactgaggcgggggcttttgagctgcttcggcctgatgccaaccttgatgttgctcatcttgcagccctgcggcacaaaaacgaggcactgaggcggaccagctttagaatcattaccgcgaccctcggactgcaacttggctggactggttagcaggtcaagatacacatcccgcagcattggggtccatgcctggagggtacatcagacagtagcacaggagcgtcttgtctccgtcacctatcgtcctccagctaggtcgacggacaagaccttccgattgcaagctctgcgaccagttcccaaacaccaaagcggagaattcctacagtcgatagcatcgtgtcatgcatgcaagagaagacgaacaatctagaatgctctgttgatacaacctgaacgagacctcacatctgctcgatctgtctgcttccctatctcgagacgtaggcctcctgtctgttatacaacagcttgtccgtgtgacaacccgctctcacgattggatcgccttggtgtccggctcccggtagagcaagtttttactaatgtactggatgacactgttgggcaagaggtatctgcgtggagagacgaaggggcagcgcttaacgtggttcgggtcggcgtagggtgatcgctctacactcacttgatactcatccctcgtcggacgaacagcctgaccttggtcgacgagatgtcgttgtagatcagttgtttgattacaatgacgttgcgactgcgtcatacgcaagacagaggatgagcgatagagccatgcgagaacacgcggatggctcaccgatgatggtacaggatatcgtgtgatagcaaaaaggcccacacatcagacccggcccgctcgacaatcaagcaaccgaatcgtccgagaatgatatggagctgcagcaagagacaatgagcgctcgcttctcaaatccgcgcgacaagtggacgcttcgacctacatcgggttcggaccagacacccggttcaccgaaactctcgatcaagtcgcctcccgcgagcaacatgaccttgtactttctcctcgacccgtcgcgcatctcgacgccaccctcgccgtctttgccgttcagcatttcatcgaaatggtcgagcacgacggcggtacgttggtactcgggttgaccggcttcccaagggtcgaccatcaaccaggtcgacgtgtgttccacggcgagctcgcacatgcgtactcggtggtgcgctggggccaggccggatttcttgtagtacgacgagctacgaattcaaatcgtgagtgggtgcctaaccagcgtgatgcgaggcgaggactcacactggtgagtaatacccggccatgatttcgaacgtctgactctcgacgatttcgtccttggccatctcgaacattcgcctgcatgatcgaagatacggacacggtcagttggcttggcgaacgaggcggggacgatgccgatcgactcacaagtgcaggtatgttgggggtgagaaggatccacaggcgacaatcacgaggggtactttttcctcgtctttcgtgatggcacatcacatcgggttcagatcaataccgctacgcgggatgtcccacgcccggaaccacttcgactcacccttcatcctcctcctcaacctatgggtcgggaaattgtacttgccctcttccccttgaagacccttcatgaacccctcgctacctccacccgtggcctgcatggccctgacgtcggcatcggcctctccgtccgtcactccattcaaggcgtcctcatatcgaccattgtcgaacaattccccgcgggatgtcgacaagggcgaatccctgatcgaaaacgtcgagagggtctcttcatccgcttgcgaggtcgggttggtcccaaacgagttggccgaggaaggtctcggatgaagaggatgcggcgtatcgtcctcttccgattcctctggaaattccctctcacccgtcctcctccccgttcccgcagcaccggcagcgccgccctcggtatccgcgatcagtttgtcgacgacggacaacctcctgaccgtgctctccgagtctctcctgccctttcccttttcctcggaggggttcccgaacatgtaacccgagactagccggcgggatcgggcggacgagtacgagacgtcgttggacgaggtggggacgcggtcgatcttgggccggctcgtgggcgaggtcgaggggtcgaccatggatgaccccgagtaggcattgggattgccattgccattcgcgttcgagccgctcgagccggactgagagttggcattggcattggcgctcatgttcgtgtttgccgggttgatgatagacctaggatcgaccccacgttgagaacccgaaggtcccgcctgagcctgcccgatctctagcgcttccaaatccctatccaacccggctccctgtgcccccggtgaccccgctgcgctcgtcgtccctgtcgacccagacccggacccagaacccgatcctgacccttgtctgtgtatccccatccccgcacccattcccgcaccgggatgtcctctcgaggtcatcggatgtcccgtcccattcgcatactcgtaatgcgtatgagtttcagcagggttgaggtgtaacgtctcgggttccccagaggcagggttcgtcgcgcctgaaaagggtggagagtcgttgtggtacgagtgtagtcctgtcagaggtcgatgaagggtggggtggttcgacgagagagtattcgggtggatgcgtgaggtgttgatgatcgtggtagtggtcgtttgggcacgtagcagcagagatcgaccaaacccgaaacgaaaagtcaagcccggatgattccatcgcaaccgagttgtcaggcgtagcgttcgaggacgattatcacgacaacgacgatatccatcggagacaagaaaggtatgcagagtaaacaaaacccgaggatcagcgtccatctctcgtttcggtcgagaggatggatggatgtcatgtgagactcacctgtagcggggaggacgggtgcgaatcccctttcgggcatcttgttgttcctgctcatcgaagcgaacgccaacaagtactggtggatatatagcctgtcgcttgctgcttggtagtggtatgatggtgacaatatttgataatgaccgtcgaggggaaaggttcaactcgacggtatgagatgatcggcggtgttacctcgaatttgaggagatctggagatttcgtcgtgggtccaaccggggttttaccgggatctaggcttcgtcttcggatgaatcgattgaacgacgtcacgaggttccgcggggtgtacaagcgggaagtatggacggacgatcgagattacgatctagtagctagtaggatctctgggaatacgatgatttttttgagatgttatgtcatgcaaggaaggcggagccgtgtggtctagttggttgctaattgatatcggaccgagtcaaacgactaggtcggtcgtacggccgcgtgctagccggaagaggagacgtagacgggttcaatataatcgttatgacaaagccaacgacaacgacggcaaggacggtagtagatggaagcaagcagctaagcagtgtagctacaaggcaagatgacagagcgagcgagctaggcagcacaactattggtccgagaaatcagatcgaccccccctcgttccgcttctcctttgtaatcctccgagatggagtctcgacggcgacgctgctatcgaccagacatgccacacagaaacgttcaaccgtatcgtgcccgatcgcagattcacgtcgtgtcttggtcaacatatcgatcgatctcatgctgatacctcacagccgtgacctggccagtatcctggcacgggtaggcaagacgagcgaattaaagcagggaccggacgttccataacaagtccggtcgtcacatcaggaactaactatcgaccttggtgaggtttgacgtgagattcttcgtcgaccagaacatggcgtttcgtttgtcgacctcgatcgttcgtattcatcatcattatcatgacgacacgaccattaccacctatcctacgaccatcaggggggccctagccagactgtacttgccctagtctgactcacttcacgcagaatgtctggcatcgtcaaatccgtacgcaacacgctcctcccttcacatggaggacgtcgtgaagaccaacccgaccccgagtcgacctctccgatccatcaccaatggaccatggcccgggtactcaagagttacatgtccgattggttcctcgtcatcgccctatggatcatcctctcctttcttgaacgtatcgggggccataagcgtcatttctccctcaccgatatttccattcaacacccgctcgttcaaccagagacggtcgggtaccgaatgttgatcgtcatcgcgttcgtcctccctaccctattcgtcctcctcatcgggctaggaatctaccgttcgaaatgggacgcccataatgccgtcctcggcgtctttaccagtttcaccatcaccggggtcgtcacccagatcatcaagatgggcgtcggtcgaccccgcccgcacaccatcgccgtgtgtcaacctccaccggggaccacggatccacccatgtacggactgtcggattacacgatctgtacccagacggatagacacttgatggacgacgcgttcaagtcgttcccttcggggcattcgagcttgtcgttcgccgggatgggtttcctggcatggtatatttcggggaaattgcacgtgggcgatcgaaggggataccgagtgagtccactcgacccgatcgtcatcagccagcgtgtggttcgggctggatactgattcatcgctcgtcgttcccgtcggatcgtgcacttcagacccgggcctggttggccatgtccccactcttggcatcagccatggtcgccgtctcccgaacggccgataaccgacgtgagtcccacatgtctattacctcgcaatacgtctcgggaaacaagttgtcgagcttccatagcgctgatgcgtcctcccggtcggctttcgtgtgattcagatcattggcaggacgtcacggtcggatcgctactaggtctcgggatttgtacgttttcgtcgccgcgatggtcatccctgctggatcagcctactgaccccatactcacacagcctacgtctcttaccgagcatattaccgtccgtcccttcctcgtcccttttcttcatgtacactcgaactgacccgagctccatctcctctacagccgccctctcgcatccatcctcccacctcccgctcgcaccgcgtgatctggtaccttcggagatgggcgacgaggaagaccaagagacccgcttgcacagggatttcagggacgaggatggggatgggatggacgatcgggtcgtcccccggccgagcgaggagcaaggatggaggggttgattgtcgcagtcgcccggcccaaagtcaggcttcgtggtcatggtgatcctgtagaatttagagtcagatttcgagttcggatagaatagagcggaatctcgtgtgctcatcttggcgatccggatggagtccaatgtgattccatgcaagttcagtcgaacggagccctcccgacccgcacttgtacgactaccgtctcacaaaaaggactcgagacgtaccggtcgagctcgtagttgtggctatgatcgcccctccgacgcactggtgtgatatgtcgatcatcattcgtgcatttgctaatgtttaccaagatgacacggggtcggtgacaataatggtggtctgttgaagatacgggctcaaggccattcaaagtggctcgtcggatcggagcccgctgcgccagtgatatacctcggcaacaggaccacccaagccacgtgacagtaaaaacgactctgtatataaggatacaatcgatgtccatgattcgtactgctgtctttcaagtctttgcataagggaaacataatggcgaaacccagggggattcggcgttcagaacatggtagattcgttcggaaaagtcatgtcgtaacgtatatctgatgtcgtgcggtcgtatgttgtgtcgaacccgcggctaatgttgcctggggtacccgatctcgaacatcttggctagctgacccaggtccatcgcgttttggaacgacctcccttgagccagatgcgcgagcccgttcgtatctttgggatcatcgagtccggcccacttgcggtcgggggaggtgatcggggttttgagttcgagcatatcgtccatgtcgatgagtgtcgaactgcgggtcatcatagatccaggcgaggcagtttggtgccaaagcggggagtgtcgtcgctcaggaggcgaaaaggtttcctcgggcgcatcgaaatcgatgagcatgtcggcgggcggtccaggatattgcttggttgcgtctctttggggcgtctcggtgaagttctcggcgcgctggccggaattctgacccggatggatggtaatgctcccctcctcgtcgttcgaagccagagacatcctgctgggcgtattgtcggcctcgaccatggtaggcttgaccttgtcgtcccgaacggccgtagggagtagagaggcttttgagattccaagcgtgtcctggtcgcgcttgtgaatgggagaggcgggcgctgattcagactcggatcccgagtcgctgggcggtttgatgatctcgtcggcatccacggcaggaagagacttcacatatgaaaacgtgattcagtcatctgatgtcatgatcggcagtctccgtggactcacactccagatatctccagcggcgacatcaaatggattggtctcagggggcggcaattccggcatctttctacctcccgacgacgacctccccatgtttcctcctcctctgacaggtcctcctagatgacgctggatcaatcccctggcagctgcacccaatggctgcctctcgtccataggcgaacgagtcgggtaagacggcgcatcccgatcagcgaaagaactgccagaaacggagcggtgcgtcgcaggaagagggttcccccgacctgtgctctgtgacggggcggcaggttgatcccatccgccatcatcttgggtgatgaccggtttgctgaccggtttgccccatccgccgtcgtccggggtagcaactggctttgcccaaccgtcatcagcctgctcgtggtctccaggcgtcgtatcccaacccgtcgcagattcttccttgttctccgtttttgcgccccaccctccatcacccttctcactggactcctcgtcatgaatttgactagcatcgtcttccctattgccccatccgacatccgaacctctgacgtccatcccgtccgcttcatcgctcccttccgcctgagatgcctcgccgactgacctcgtccacttttgaatgctcgtcgcaggggtgtcccaatcaaagactttggtcgtttgctgttccgggtcgacaacttgatctcctcggtgaccagtctggttctgggtatgatcgacggtgtgtccagagttggcggcggcaggtccattcggatccttgatctctaacgccttgttctccctgacgaacggaacgtttgcaggcacgggcgagatggataccggaggcgcagcccatccgccttgtccgcctgcatcagatcgattctgcgcgggtggagcagaaacttgaggaggtggagtggcatagtcgtaccatccggaactttccgagcggatgggcgcgacacacagagattcggtaaaggtagtcggttggctttgagagtgatgggattgagattgtgactgatgacgcggagcgctttgatcccgaggtcgaaagtcgggctgatgaaagggtggttgatgtctagggctcggtttgtgagaggcagaagtgttcgatcgaggttgagccggaatgggaggagcggggacgtcccacccggtcgaagcttgttcgggttgttcagtcgaagaaggtgtagcgaccccccatccacctgcagagccggtgttctcattctcatccgctcgaccccattcatccgcttgtggactgggtttaccccacttactctgttcctcgtcttctctgccttgcgggaccgtatcccagatgtctccacctacatccgacctcatcccgcttagtctacccttagcttctaagcctgccttgacaccgaccgctccggccgagcgttctccccacccctgtcgaaccggcttggtatccgcctgcctctcatttccctcctcctgatcagcaaaagaaacgttgttcccagccttcgcttgaccccatcgaccgcgtcctgcgaggggaatcgagttggtgctgcttcccaacgtcccgtcacctccgttcttgctaccgccaaacgaaccatagtcggaggaagattggcgccagttgttctcttgggaacggatatgaggtggacaatcgtgagagttgtgggttgtgattgtattgttacctccttgcagaagggcctgccgagaaggatgcatggtgagtgtctagaaaagagagtgcggacatggtcagttctccgcaataagatcggcttggacaccgttgctacttacttcagaaatcaagctctacgtctgcaatattcaaaatgcaagccctaattgaccttggttcactaggtacgggtttgtcagttgcgattcgaccgttcgaaatggtcgaattcttatatgtcgatcagccagaaggcgctcttgttgatcaatggaggggtttgcgcttttggttggctcgacggatttgatgatctggatacagatccactccataattttgtacccatcagatctctccatcaggccatcatatcaatggtcaaaggaggcaacgacggcgggaaaaggagggggaatcgtcatcaatccccagcgctcatcatcagttccaacagatcaaagatcaaaccaacaacaccagcatccgcgcggcgcgcggcgcgagagagatcatcgatcagtctaacttagcgcgatcacggggatggcatgaaacggcagtcgacccgtgatgaccggatcattttcgtcaagcttgaaatgtaaagttcctatgcgtcaaacttccagactctaactacccctagctcgttctcgctcgttccttggctggcgctatccttctcatccagcatcaaccctacgatcgtatcctcgttgaaagccaaatccttgacttttgcattctcgctacccggagatgtaggagaagagagtaagagctctcttgccgcagagacgagagataacggatgggtaacgggcggcacgggcagtataccccgtttccagccgtctttgcccatgtccacgtccggctccgccgagtctcccttgactcgctctcttggccgtctcgtcccttcccgaatctctacgacccccttcctcccatcccagaccatccccatcgtttcgtctctcccatcgatgtctcctccggcgtctcgcgcctcgtcttcttcttccggcgggcgaaagtcggcgccccgatcgagacgccagaccaagactctcccatcctcacccgacgtcacgcaccggccgttccggagcgcgatcgacctgatgcccgctccgtgtcccaacaaggtctgagaatgttcgatgacatagcccgatgagtgtccttcctcgaaagctcgtatgttcctccctaggcctggttggggatcgtggacactccgaagatcagggcgaggaggatggattcggtagatctcgaccagatcgtccttcccagctaggacgatccaaccggaagataatgccatgaccctcgcgggtgcccctgggcgagttttgaccccgacataggtgtctcggtactgcttgttcggagatgactgtcgcaccagctcgataggatccgagagaacgatctgcggttcgttcaccatcgccgtggtcgaggccgcacgttcaggagcgaggtgtacgtggatatcttggatggacggtttccagctccgagggtaaataggagaacagtacccgagcctgatgatgcacgtcgtaccctttttcgacgtcttctcgctggacccatcttcacgatcttcctggtccggatccaactcgttttgtccacctgtatccaggctcaggctagccggccagctggccacggcagagtgtatcaccttgagcagtttgaccgagctcggtcccccaccatccattccaccttgcccagcaccgttcgtgacctcgaagatggagatgtagaacctccccgtgatgccgacaacaactcttcccctgatcccggccaggacgactctctcagcgggcggaggtatatagtgcctcttcctgctcttcctgatctctgccggaacatgcacgacctccctcgtccatatccttccaggatcggtatcttgatcgggaacaagctcatgcgggtgcaaggtcaatatgacgaagcctcctgaccggtaaaacaggaccagccggacttcggactcgtccgactcatccacggccatcgaggttatcaagtccggtcgggagggagaagaccatcctggaggtggagggaccagggcgatgggccggttcatcgtgaacggcgcattcgaatccgtggaccgggaaagttccgcaacgagggggttatccgagttagggtcttgctgttggctgaactctgcgccgaggtcgcttcgaagcggccgcgagtcgtgcacgtgcaaaagcggggaattggggtaggcgaccagtacgaaatttccggccaggcagagaaggtgtttgggtacgtcagtctggggatgcgtttcgagtcgcggtcgtggtggagcccgaggtataagtgttctcaaaggtccgagtcgaggatgatatgagatctcggcatcactgtgcgttattggtgggaatggaaatccagggggatgtgcagggtaaggcaggtttcctgctggtggtacgatcgatcttcgctcgagtgtcggcgagatcgcttctgataatcttgacgtgacaatccgccttgaagatggccctggctgcagatccacctcttgcccagacctgccggacttaggtaagacgctcggagacggcgaggggctcaacgagtgagtgacggcgtttcctgtagaccaattcgtcccaatcctcatcaacgtcttccagtccacgctacccgcatccggtcggcctcgttcaggcggcgtcgagcgaggtgtaaggggaagaggggttgcgaggagaggcgagtctcttggcgccctcgtcgctctcgagcgcgaatgagtatgtgcccggaggtgatgcaaactgggataaggaaatctctctggtaggcgagcgttgattgaaggtcagcctgcatggatctttcccgtcaaatatgtgccactcacctagatacatcttccgccaaagactgccatcctcggccatcctcctccagtaccggcaaactcgctcgacgttgatgatctcatccacgggcagaaaagacaatatgtgtaggaaaatctcggccgactcgaacacggcggatcgagcggccagctctgaaggcccggagcatgatgtcgatgttgataccgacgtggtcgagaggcgaatacgcttgtccggtcggtccggcgatgtggatgtccgccgtttcgttcgcaactccttgtccatagcgttgtatccctaatctcaagtaaggagtgcggtgacaagcttcaaggactttgggtgaccgatcgctcacatcagttgatgaatatgatgtggtatcgctacctcgacctccactttcaaaggtgatgaagccgaatcgatcgactatttcggatgcaattcagtcgaaaagcttccggatcaagcctcatcacgtcctccgcttactgcttcgtggacgagtactacagcatgatgatacgtctgtccaggtgtccgaatagaaacacggctgcagctccgtctacttcggtgtgagaagggtatgggtatcatggccgtatcagaccaccgatgacgggtcgcgtacttggataatcttcgcttgtttcagtttatcagtcttactgatgttgtcctcctaggcattcgcttgcttctcccatttgattcgtgctacatcatttaatcaatccccagttcttctcgttattccctttcacagggtggcatgatgcttgatgtgcttgagggcctggaccagtctcgatatatcggaacgaggtcggtgtggcagaccgctgatatatagactgaagggtacgaccctgggtcttatggaagtgcaacgaggaacctgtggataccataaagatcgtaatgatgttcaacttgtttggccggccgtacacgctctggccactttctcccggtgaaggacaatgagacacagttctcgacgtccccaatgggcggactgcgagtgactcgtgagccacggaggactgtaatgatgaagttgtgcagcgaaagcagagagcaaagatccggctcgggacgccacagaatgggatataaccctcaaacgagggcgtgtcaatgtgaaccatggcagcaaaacgactcatgcacggcgcgaccacccgtagatctgtcccgccgacatgccctcgtcgattgtggtgataattcgatcgtgatcatgatcatcatcctacatccccatatttccccccttcctaccgcaaacgacctttcccttcaagctgtatatccaatcggtggatggagggtccttgtcggtcgagccggacgtggtggaaagagaagcctcttctggaatcaattgctttactccgaagcggtggcacgggctaaaagagcaccaaacataagaaaagagacatcagcgtcctctccacacatctgcatggaccacccgaattcgagcgaatggcggaggcggggtacgcactgtaaacccattgtccgtggtggtggacgaccttcttgatcaaacccatgtcctccaaagtcctcatggcctttcgggccaaagaaccgttgatcttcatacgctcgatgaggacggactgggagatcatcttgtaggtagggacctccttgaggatcttgtcgctgtgaagaagcgatcgagggacagatggagatggtcagcaagacccagggcgatatggggaaacgatgcttgaacgtactaggtgggcttgtcgaccatgacggcgttgttggccttgtccttgaccttacccttggaccacttcttcttcttactaatgagaggtgaatgtaggatatagtcagtgacgtgccgattgcgcaatggctagagggtctgcagaaggttcgaagagaaacgggtcgagcgagattgggtatcgaaagtcggtttgctgggatgtccctatgtctaccggatgtcgaattattctcgagaaaagtcgatttctagtccggtcgtcgtgctgggtatcctccctttgcttcgaatggctccacctcattcttccctttgcatctggaacttcaagaaccatcctcatgtcgtcgagacagaatcctaagatcgcccatttcttctccaacctgttcttgattcccccatcttgcttgtgtcccgtttctctttcgaaccaccaccctgcaaatcaccctatcgaatgttgaactcacccggcacgagaaccggcctgagcggcagccgcgatttgagccttggtcttgggaggctattaacatcggggaaacgggcaagggaaacgtcgtcagcgccctgtaattcgtcgttcgatgagagtgtcgaggtaggggtggctcaccatgttgagtcgatcttgagggttcttcctagactgaactgaagagcaagagcaggtctgggcgtggatgaagatgtcgatatcaagggtgaacgttgagaggtaggtcaagggacttgcgatgccctcgggacggctagagaggcgagcgagagttggggcggtgggcgagggggtgtggtgtgggtgagagagagagggattggctagagagtgagtggccagagagaggcgaggcagggcagcaggcgaggcgatggaccgcgcgagtaccagacctggccaaggcagggcgacgcgcaaagatgccagacccagcgcggatcgattcgcggaagcttcccctcccctcgactgccatttccgcgggaaactcatagaggtgagactcttggacgactcgtaaagtccgacgacctcgacgcgtcgaccagcctgcggggggttatcctgtttcagcttgatctctgctatatgaaactagaacacgcgcggcgtgactacatcgccggatcactgcacaaactgcgctaggcaccccgccgagacctataagacacgacttatgtatggtatctggctcgggctggttttatttgtacaacgcatctcccctatacacggtcgaaccgttcactcgcccaactctctcctgatccgttccctcacctccctcaaccgtcctccttccgtaacatccctgacgagcacctcgggtcttccaggagaggcgggaggagcgttcatgtgacccgccaaagtgttcagcgtcgtcgtcgtcagctggacggcgggcatctctaaccattcttgtcgaccgatcagacggaggacaaggaagctaggcgtcagggtcgtcaggagtatcaaagagtccctcgcttcggctaatataacccagccccggtcacgctcgatatcagccctcgtcatgtagaattcggtggaagaacgacgaccggatgacttaccggcactgatcggggtctttgaactcttgaccacgatgtccaccacttggcccatagggaacgctctcctcctcgtcttgctcaacggggaagccggaccgctcccacctggactggaatccaacccagagttactcgaaatggaagagaacagcctgtaggtaggacaaaggcgacgtcacggatccatcatcagcgccgaactttctcccgatcgactcgaaccagggcgatgccaaagactcacatccagaccccctcggctactccttcgagtcggctcagtgtgctcctccgtttcaattcagccgcagcgtctgatttggtcatgttaccaagctttgcgtgcaacgagagatcactcgagctgcttgaagacgacggtcgatccttggtcgtcctagctttgatctaaatgagtagtttacgaaatatagctagttcgtcagtgcttctagcaaattcagtatccgcagcggtcgggactcaccctatcatacaaagcttgacgccgatctgctacgctgtcctttcttcccccgctactagatgccggcgtcgaggaagagctcgcagggatactcgtgacgggtccaaagacatccacctcgtccgatcctagcgaattggcggagctgtctagcgctcctgatcgcgaaggcgtgaaaagaccaaagccgggcgtctttccgatagacaacgatttcgaggcggcggctttgcgaggggtcggaggtacttcaagggcgggtaacagcggacccagcggcgtcgaaggcccagaagcggtggacgggaggttcattttgacttgaggcaacttgggaatctctgccattgggacgttgggtaccatatcctcttcatcctcgtcgtcaccatctccacgctgaacggatcctctcgacctagccgagcgttcccggcagagctcccaccacctccacactttagcttcaaagcgctttcctcgttcttccccgccggcactccaccgtccgagagcgcccatacccacgctcactccagcgttggctcctatctgagtgtgcagcgagtttctcagggaagccacctcgagcggggtcaagtggagtgtcaacccgatgccatgcgtcgtcgtcctgcgagacgtgatcgggtcgagcgtccgggcgagagtgatcaagtaatcccccgcgttggtcttgcctccgacctgcctcgatccttcttgttgcagagcttccaggtcgtccagcgccttttcgtccccctgccatccccagatccagacgagccgtcgaagctcggtgaccccgaatcgcctctgacacgtcttttcgatcatccccttcatctgtaaaaagtttgacaggtcgacgaggtcgacatcgagaccgttgcccgtggaagtttcgagctcggcgtcgagaggaggcaggatgggaggatgcgtcgccagccacaacccgaggctcaagtcgaaagcggagtgcagcaggaggagcgtcttcaaatgcccgggcaaggcctccagcttgctcttccccgaaggatccgtgacctttctcttccccggagatccagcgatcgactggaactgcgtgcgtaatcgaggaggcgtcgagggcacagtctgaccgggcaagaagggtttcgccgtccggggaggtggagtggaaggtcggcccgagccggaagctacagggaggacgttttggaacctgttggcgtgctcagattctcttgattgaggcggggtggggaagggagcgaaaggagggttaggtgcgggtgctctgttgatgatgtatgcagcagcatgatcattatttcgatcgtcaggcagcctcgtctcactcgagtcagacctaccctcgggacactgggtctgttcccaagttcctcttcttcctctccctctccttggtaggtggcggtgtcaacatcccagtgacctcgttgaccccgcacgtcccctcgacccctcgtccttcttccacatcagagagatcgacaaactcgtcctcggcagtctcgacctttccgatggaacgtttccggctctgccgaacggtggaaggtgcgagtgatgaggaaaggatggggagttgggttgattgcctgttccgagtcgatcttcgggttggtgtcgaagtcgacatggcgagatctcaggcgttattactcggttgggcgagcaaggatttgtcgctcgagtaagtagatttgtttatttataaggaatccggttcctcgtgatactgttggtgatgttgtcgacaggtttcaaaattggcgatacagttggcgaaaagaagctgaaagtaggatcgaagggggccttgatcgacaaggcttggcggtgagagaattttagagattccgggtaggtcgctttgttgattgatggcggaaatatccttgtacccttgggatagagactgagatcgacgcagggattactggagtagtagaagagggacgaggattaagatgtgagaagctaaaggatgacgcaagatcgaccgggtggtgttttgctcgggattgctggggtaagtggaaagggagatggtggaggacacgagggattgaaggtggggatgccaatctgacgagaggatgggtaagaagaaggggagggggggtgaagggatgaagattgtggtcgagatcggatatcagttaggtgattacctttggaattgctcttctgggccatgtcgttccatgaatgttgaacgatgaatctactctcgcgccatcttgcaaggggggccgaggtagacggacattgaatgctaaagggtggtggcaagcggacatcatggtgtcatgagctgaataaatcatctgatgtccgtggccagtcgcataaccccttcatgtccgcgtcacgatccctaaacgactctggtagagaggcacttgtcatggtcttgaatctacctttcgaatcagtaccaggcaggaccgcacccaccgaatagatagagtttgtttatacacgccgatctagtagagcccgcatataccaagggctttagatctagctacacagaaaacgccgaaagagcgacctagacgaaaccgaatcgcagacaaaaggaaagggcgaagcagaatgcgttactacgagaacaagttccccgaggtgcgttttctcggatcgtgtctacctggatttcatagaggaccgatccggtagtgtgcgtttcatatgataggtggaccagttggtcatggtccaggtcaagcagattgccgagatgggagcctacgtcaagctcgtgagtcgccctcgtcctttcaaccttcgtttgcccctcctgattgtcatgttgcggtggccgtcatcttgcagctcgaatacgacaacatcgagggaatgatcttgctttccgaactgtcccgaagacgtatccgatcggtgcagaagcttattcgagtcggaaggaatgaagtcgtcgttgtcatgagggtcgaccctgacaagggtaagccttcgccgaagtcataagggcaggcaccttcgatcaaaagcctggtcgctcatacctcgcgaatgcgttcgtccacctgataacaggatacatcgacttgtcaaagcgacgagtctcggcggaagaggtcatcaaatgtgaggaacagtacgaaaagggaaaggccgtcgactcgatcatcacccaggttgccaagaagtgtgatgtcgagaccgagcagttgtacgagagcgtcgtctggcctctcggcaagaagtacggacacgctcacgatgctttcaagctcgccgttacgtgagttttcagcgcgaatcctgtctgccctcaagtctttcgcgctcaaataccccacgatgtgatcctttacacagcgaatctgacaccgtcttcgagaccctcaccatgacccccgaggtccgctccgaactcctttccaccatcgctcgacgactcactcccaagcccgtcaaggtccgatcggatctcgagctcacctgttactcgtacgagggtatcaacgggatcaaggccgccttgcgtgctggagaggccttgtccaccgaacaggtacccatcaagatccgtttggtcgcgcctcccctctacgtcatgagcacgaccagcacggacaagaacgccgccatcgagttgatggagcaggctttggccaagatcggagaggagattgaaaagttcgagggagccatgaacgtcgccatgagggtgagcacagcatacatcgaaccccccagcgggcgtacaggtggctaattcgtaattacattccataccactccgtatcatcacagcccaaggccgtctcggccgtcgaggacgatgctctcgcccgtctcatggaacaagcagagagggagaacgcccaggtctcgggtgacgaggatgactcggaggaggagtagataccggatgtctagcaccttgtatatcgaagcataatctgcagatgaaccgttgcttcagtcttcttggtcaagacgttcctagcgttttacagctggatcacgagagaaatggttgggaaagcttcggaagagcgctggggtgacttttaacataggtaggtctgggctgataagcgagaccccggcctgcttgctatcccgtcgtgcagaagtttctcgccgggacgcctgcgtcgaggctaagatataggaatctgatttccatagggctggcctgatgaatcgccaataccccagtcgtcaacttcacagaaagcctggcattatgatccagcggaagttcggtcctgttccaacagtcataccgccaaggactttaactccgcgagattgaatggtgcttgcaaatgattcggagccgtgcattccagcttccgtcgttgtcagtgtgtaatcctagacttgaccctctcctgacacggcttgatatctggtatgatctggatccgtcaatctgtcgtgttagtcgcagaaacgttgctcgctcgccgtttccacggatacgacagaccaaagtcatctgtcctcatatcaaggagccgtgttcatagcaccagttggtgaagtcagccccacgaaagagggggcattccagccgtctctcccacgtggagatagatcaggcgcaccaaaacggctgtgtcggcaactaaccatccgtaggtgagtgcgcaaggaagacagaagtccgaaggagaatgtcggaacctcctccaaggtctcgtcgtgcagtacttgatggccttttgtatcgcagatagacatcgcacgaatgcggtaacgcccagaaaagcgggaatacatcgattcaccatgcagctcgaaggcggcgttagaatagcgcaccttccccatacccgaatcaacctgacgagcgcgggaatgactttgagattgtgaagtagtccgtgctgggggtgtcgaaatgacgtggaggatatgttggttgagacgtgtccggcaaataatcggtggacgtgacctttaggccgaaggtgaagatgttttcgtctagagcgtatcgactttctgcgtttgcattgagaagacaatcttcaaccgagcaacaacatgagatccaggttgaggggagtatcgacccaatatcagtataaataaaagtaaagaagccctcgaggggattcgcccgtgtcttgggggcgaatgttagccgtcggtttttttcacatacggaagctgcatcaagaaaggcaacatcgttattcgattatcatggataatcttgtctcctcgagaatccttccgtcaactcagttttgctatcgccgtttgaagtaacctcttgccgcacgttgcaactcaagacccgacctgcttcttgccgagactgtccccggaaagggatcgctgtcatgtggatcagatcccttccatgagggatcaataaaattccgcggcggtggcacaagtgatgaaactttttgagaagagtcgacagaagattgcccagggtttgggattttgtggctcgatcatcattgtctcccgctcgtgaagatcgctgcaggaacgttgggcttcattgatgttcgggtctaggtaaaaagtttctttccactgatagttcggcaataataaccttagatcaggcattcatacatattgactagctgcacgatctcgagcaaccggcacaagatatcgtgggtgtaggctgtggcttgaggcgcaatgtttcggaaccgaaataccaaattgcttccgagataaggatcggaagcatatccttccgccgaaaccgtctgatcggccgatccgttccaaatagtactggtcgaccatcgccccgtttcctgaagctgacggttgaacatgcagttcacacacgaataggcggctggatgaggctcataggagtcaagctaagatcctgtcctggctttcaacatgtccgaaggatcgctcgacaacaggcttgatgctcttttacaaaaacggaaacgaaatgcgacgtataggagtttgaaagagtacaggacggtgcagactgcaaacgatcgagcaggcccaagtgctggagagctcgtcgacttcgtgagcctatggtatctcgttaagaatgaccgtgacggcacctgatgaggaacctctcgctgtcagtcgtcgaacgactacctctcgctcacccactcgtcttcgctcagaaagcagtatttgcggaagctagaggaatgtcctgctccgctatttggatcgaccggttcccgtctcctggatggaacaacaccatatcataccgccttggaggaccggttggctggcttctttcgctacagcagctcaccaactgaggccgcctgctccgtttcggacacttcagccttgttgttcaattccgggtacgatgccaatgtatcgttcttttcaacggtaccccaacgtggagactacatcgtgcacgatgagctagttcacgcttccgtttgggatggaatgcgaagtaatgctagacgaggtgtgacggaaagtcaccgatatagctttcgtcacaactcggtcgacgacctcgagcgggtgctccacaagatcgtcaggctagaagagggcggaccggagtcgaggacgatctacatcgggatcgaatcactttattcgatggacggggatctagtgcctcttgaagaaatgctcatcatgctggagagtatgcggaatcgttttccccgggtcatcaatccgaagaaggtggtcatcattctggatgaagcgcacacgacaggagtgacaggaagcggaggtcggggtttggcatggcatcttcaagccactacaggccgtctggggtcggcccgccttgaaaacaccatggctaagatggtaagagactggtgtcaagtccgagtcatgactttcggcaaagctgtcggcggtcagggaggtaagtcacccgtctacaggacacatcgctgacgtgtactgactcgcttgcgtactggcttatcagccgtacttgtggcatctccttctgttcgacaattccttatcaattatgcacgacctttcatcttctcaaccgccatgtcagtgaacaacgtgcttgcgatcgagagtgcctgggatgtactggaaagcgacgaaggagatcaggtgagaacgcaatgtattgtataaacggctttcactgaagagattctcgatcgcactagaggagacttgacttgcagcgaatatgcagcgtgttcaatcgccaggtctccgcagtcctaaaggaaaacggcgtctcagactcggtactatcgttgttggctgaaagcgatgcgacatggtcgacggcgccgacgcacatcacccctttaatcacgccacatccacatagcctttctgtgcatctgagaatgcgaggttatctgacgagacccgttgtccacccaactgtaccgaaaggcaaggagagggtaagggtctgcctacactcaggcaatcgggaggaggacgtccttgggctagtgattgcaatcaaagactggatagtagaaggccgctacacagccgtgatatccctggccaaagcaaagttgtgacaaatgtcatcgatgcaatatgttacttcctcccaaatcaaacgacatgttgccgcgatctggctatttcttgttgaggaaacctcccgaaagtctagataatgctccccctctttctcgtgcaccagctcggtcgattctgggacgcttagtagtgtttgtaggcgtagcgctgcttggggctgaatcgttcgcgctctctgtggtatgatcgcggtcagagatgtagcttggtacagtacttgtaagactcaccatcgtgcccccgcttgcgttcggaagattgggaccgttcggaggcgtccatcgatctaccttcaccgcggtcatgggcgttcggagaggatgtgttgggtacgccatgacttccggttgcgttcggctctacgaatactccgaggcgagatgataatgacgccttgacaggggttccgggagaggacacggaaagctggaaatgatctgtaatgagtgcggttccaattttcaatcgaggatgatgagcgacgtacctctgcctgagatgctgctggtaccggtctttcatgagtacggcttgaattgaatgaatcttccctaccatcccgcctgccccgtgcagcagcatgaggaggcggatcccgatcgatacgtaacgttagactttcgatggccgatgcgttcgatgaatttcggtctcctgaaacctctgggcgcgcgcgttcaacctgtactccaggtgcatccggggatatttcattgcgggatgataaacccatacgctccgctagccgaggtgtcagatttccaccgtctgggatcgcttgtgagttctgaggaacaacatgtgcttgcccattctcaccaggtctgctgcgcgggcgtgcttgacctggcgcagtaagggcaccggtcggggtagggtctcttctgtccacatcagaccggctgatcagaacatccggcacagtccgaggatctcgtctttcggtctccaaaacgggcggttcctcttgacgggcagtgccacgagcggcttcatcccgacgagaactccgatctcctcgatacctgtcagccgtatctgtggctcgaaaggcgtctgtcgattggtccttctcgcgcctggaatctcgtattggagagcgttcgcgctcccggtccccacgtagacgatcgctcgtacggtccgaagcagtctccttcgaagccatcttcgatgcgcgctcggaatcccgagagcggttgcgatcccgatctcgatcgcggttgtctcgatcacgcggccgagcgtcgcggtcggatctcctttcgtcacgctcccgagcggtgcgaggccgctcatcgcctcgagcccggtcattcctatcacgagtcctttccgcatcctttcgagggaggtccgccgaacggtccttgtcggagccgcgtccgcgctgtctgtcctcccgctctctgactctatctttagctttgtctctgacgtcgtgttcgcgatcccgccctcggtcccgatctctatctctatctcgacgtctctcagcctctctctccctgtccctatcccgctcgcgttcacgttcggtccgttcgcttcgacgactctctgtccctctatccttgtcacgcaacagctcttcgggttgctggtctcgtctatcatcctcggcctttcgcgattcagcactttcatagggcttgcgtcggcgatccgcatctcgtttcgacaagctgattctgctagccctgctttccgtgctaccgttcctgctacgggacggacggtgcgggggagtgtcacttcgcgtttgccgttcgatttcatcccgtagctcccttggcggtgctgggggaggaggcatctctcgagatctcactagcatgtcgtcttttgtcttgatgcctgggctgacatcgcgacttctcccagccatcggagaagacggccgagttgtacgagacacatcccggtccaaatctgccctggggccacgaggtacgagggaagaatctgacgttatggacgaccgccgcgatggaagtctcgatctcggttccgtaggaatgggcgagtctcgcgtgcgcgactccgccgtcggatgggcagtaattgtattcaaagagctgctagcttttccatcgtcttgtgcgggcgaggcgtctgttcgcggggaattggccactcgattcgtggcagtaatcgcggcagtttcgtcagcggcaggcgaggctacagcccgagccttgccctgagccttgcgaagtgtcagctgctctcttagcttttgcaaatccacgggagaggccgcaacagtcgcgagagcgatttgtgattcggcgttgagagctggttcactctctgcttgctggagtagatcgctccttccaatggcgggaaggggatccagggctggtggaggggtgcctttgccgactagtcctgttgcgaaatcagagtcgatgaccatctctgcagaatgctggtctattcccgttggttcttcagtcgcagcggctgaagcgacgttgagattggccacagcatccacgtccatgaagccacgagtctcttcgtgctttctaggctcgttctttggcgttccgggctgccctgccgtcgacgcttcattttcttctgattgcacgttagatggtacgactttcgctttggactgtccaggaggtatacagtagtcaccgaggggcacgaggacgatagatttatctcgctttgctgcctctagtaaagatgtgtacctggaagacgttcggtcgtaattcagccttagctcgtcccatcgaagcgccacattccgcaatatgttctcacgcttgaacaaccagcagaacgtcctctcgggagtcccctcgggccctctctcttagcttgaactgctcaagggatttgacgatgtcttcatagagtctcttgactttgggaaatgcaggaatgagcctttgagccaatgtgagaccgttcttgatatgcagataatcagaggtgtccaggcaagcgatgatagcctggagcacaaagttagctgcattttactgtgttgtcgactcacagaccacttactttggtcaaacgacgatgccacttgtaacacatatttcggaacatctcccaatccaggtgacgtgcaccgtctagacgcatgccatagtggagtccgtcgaaattctcctttggatcggctcctaacgcttcggtttggtagattgccttggaagaatgccaacgatccagatcggctagcatcgtaaccatgcattggcctgaagatgtggaaggttgatcagtcacggagcgccgttcggccaattctgatgcgatggtaagactcgcctaagttggcaatctcagcttcactgcaagcgaagatgaaaggcacaaagctatccgggaagaactatataattcaacgtattgttagcgcggaacttaaatacacgtcgggacattctatacttgcctcttcgtaaaacaggagaagcgaaaagtttggcgttctggagtcgtgaagatatcgaccaaatcgcgccacaaataaggcatcagctgtgctggagatggcgcggggatagaagcaagcggcgtgcaacattccggccagctgtcgtttctctcgaatcacaattttctctgtacatcacaattagatgattatcaagactgctgcttcggagtgatagaaaagtgtgcgtaccagggaaccaatgattcttctcgccgtccagacgagcggcagcggtggtgacaagcttttcttgctcttgttgttccgctttgagtttgtcaacgagaccgctcagttccatcctgttggagcgataggcatccacccaatcgacagtgagtgatctcagcccggtccagctatcaagtctcgctatagagacctccagacgagctatgatcgaggagtaagctttagcggggacagcgagctccggcaaagccaattgccaaaatgagacaataaaaggctccctgaacgtgggtactgtcagtcaaaatcatcgaggcgcgggccttcacacttacaagccgttctcatgcagttcggaagtgacgcatttcgcggtgtcgacaaccaagggcaacagaggcggctgtatagtctcctcgttccaagtgataagctgggtttcagataaatcgagaactcggttcttccagcccaggcgtaggcgaaggtacgcttcgcggtcatgctggaagccggaaacatggattagtcactgatttaacgcggtagcatctccaaagcttacgtaaatgctgcggtagagttgaggacggataatatggtatgctaaatcccaattcaccccgaagtcttgataaagccttatgaacgacggtagtagggatgcaagctcttcggcagttaaaccggcgacgagcaatcgaaggtattgattaaacacgttatggcactgaggaatatgtgcgaagcgagattagtgatgcaggcggaagctgaattcaccacgatctgttgacttacatcatcaaaggccaaaccaagctgcttagtatgtcctagattctccgttgcaacgaagacacatgcctctcgggcctgggcgatcgcaactaagatgggcaacgtcaaacctgagttctgcagagcctggagtaaccgttgtttcgagttgtcataaactggaggtttcttaggccgaccgcgattcattctttcgttgtcgtccgtcggtggaggcgggaagcgaatctgtgtcagatcgatggcctctcgctgcatgaggggccccccagcaaggcaggccacctgagcttttgtcagatcttgagccacttcgatgccggacatcttgctgatcaactgtttaagcgtgatcaaatctgcaagactttgccgcttcaattgattgccaatttgttgtacgagaggctcaagaggcatggctgtgtaacgcttagcgagcctgccgatgaaggcagagacggctataaacgaaaagttggagtgagtttccaaggtaccgagcaacatccctctcacataccctgtaaccaagccgaagccgtcaatccatcgcttttgaccctttctttcgtctcatccgacagggcatccagcagcatgaacatagtaacatcccaaccaaggctgctaaggtatcttgcgctctcgacgacggtgtcgatcatattctcatagctcatgatttgcggcaaaatggcttgccatagagctgttggtgctgagtaactccctttgccgattgctcgagcatgtgcccgattgagctcgcttgtcatacgcttgagggtctgcttcgttgtgttctggatggcagcagccgcaagtcccatgaccgggatataagatcggtccttgctgtccgacatggcgaggtgccactcgccatacagcgaataacggaattgatatggcaggggtcgcaggagcggccagagttcgttgttgtacccataattggcattcagcaacggcattgctggcaacaagctcgttctaatcaggttaacccatgccgacctgacggagtcggatttctgcaggaatgcatgatatttaattgtcaattctggcagggtcataccaaaagatcacggaagcttacgtctcgatttgtatgatataccccgatacggcagagccagatcagaacagacacatcactggctgctcttgctccaacaatgctcatcagaggctgaaccctggtaacgacttcgcaaggctcggtccatcgctgaaggcgcaacgtccaatccccgaagaagaaccggaatcttcgcctttcagtgtcgatcggtacgggacagtgaatcgaatcgaccacttctggttcaccaaaggcaaagtgtgttcggtaattcaatccgggaggcggtatgccctcattgcgcgacgcctcgacgacatcgtaggcgggctttacagcataccgcacgacacgcatgacgagagctgcgacgcgctccgagtattgcgcaatgatcggccagcgcgaaatgatgtagaacgcagaagaaacttgtccaattgcgagaagcgcctcgcaaagctggatcttctgctccgggatctcctttctaggcttgggcacgtccgcgtcgactgcggctttggaggagatgcccaacggagagtcgtcatctggcagggcggcagccatgagcaatgcatttcctccaagattgcggatgtcttgttgagtcttgatcctgaaagctcgaattagtgcatccatgctcgcgtcgtcaggcgtaagatggccaagaatgtccactgtccgaatcagaccttgcctgatcagaatggcggtgacatagaagagctcttgcgaagccaccgttggatcttgttcaacgcctttcaagtccctgtcgtcatagcggtgactggcgaacttgaatcctaaaacctgagtcaggactcggttgcccgtctctgccgagattcctccctggaaatcggtcattccgctcgacccggcgtcttgatccattcctaaatcgttctgctgtgtgctctcatggtcctcaggcttggctgtgcgcaagttctttctggcccaaggagtacactcgaataggtcgagctgaaatcgccaatgagtagcgagcttctggcaaaaggcgtccagcatcatgtccaagacccgttgcgggctgaggttaaaccagccgataacggcgagacactccctccaaagagctttcgctctcagcttcctttccgccgcatcctcgtcttctccccctttgctgagatatcggtcatcggcaagcagtaccagcaaagcagcgtatccctctgaagcttcccgagacacattgaacttcttttgtttgtagaacatggcagtgcgtttccgacgctcagcggcggagtgcttggcggccgagctgttggccggtagcagtgagagtgcagggtgacttatcaagctcgaaggcaatacatgcgcagcttgttccgagctgatccatccggcgatctgttattcgaaataacatgagtggctagcagagtataagatagcattcctactgactatgagcgtttgtaatagctgaagtgaccgggatagaccatcagcttgggccgaggtaccagtatcgacatcgataccggcttccgcgttcaatcgggcaagctcgtcttttcggacgttcgactggttctcgaccgattcaatgacatcgagtaatgcttcctggaggtattggaggttgtcgtgttcattatagctagagaagagcgtcgcgagcgttacgattgaagggtatgtcgcttgtagcaagaggtatagcaagatgtgaagcaaaggcagggcggctgcgttggtccgcacttcatctagtgagcgggatagaagttcccgactagatccgaaccatcggtcagactcgtgaggtgaatggaggccattgtcttcacacatacgttcgttgctctccaccagcggtccatgcttcgtcggaagtgagactgtcgaccgtgtctttgatctctacccagccctgctcgatcacgagatccatagctatctcgggggcgacagctccgaaactttcgaagcgtcctatgtcaaggttgcttgtcgtaagatgaccgatgtacggttattagatggaactcaaatgcttgtctcaaatacccgttcgacttcgcgacgagcttcaacgagggttcaagtggatgagctgccgattccgcgatcgcctccactttcggatgagattaaatatatatatgcgctttcgacgacatcaaggccgttggggcctgcgagaaacatacacggattgacaacggttaatacggtggccagtcggagctgtcatgatgacttttgccagcgggatatgcatctatacgtgcactcttgactcataaaaggataacaatgaatgccgccataaatctattcttgatgagccgcgtgcgacggtacatctgaaagaagaacgcttccatattgtcgatccccctgcaggcccttgtcgccgtcgtcgtcattgttgctgttgtcttgccatatcgagtccacggtccgcttccatacggtccaaggctcctgtccagggatgaatttcgctttgactaagcggaagactttttcctctatcctatcggcaaacagaagagacgccaggatgacgagaagcgagagattttgtcgcatgcccgaaggatcggcgagatggggttgttgcacgacgacgatgtctggcgggataggtcggtcgcaaaaggatagcaagaacaataagtgggccgctcgaattgactcgatccaaccgttgagggcggccttgaccgtgcctgatttgccctttgatagggttctcggggtcatcaagcgctcgaacatctcggttgacgaaatctgggtatgtccttcttgatcggcagtgaggaggaaatgccgaggcgtccttgccatcaggagctgaataaacagcgagggatgtcgcgtctcgatgagaagacatggcttgcgagacccctcgggatcgatccgtatgggtttccgggaaggatccgcaaacttgacttccacagctatgccctcctcttgcacgcgtctcatcaggtcggggagcagcaatcgctctgctttcttctcggctgcgttgacggcgcggaatccaatcgagcgaccgatgcctcctacgtcaacctgaacgggattccagggcatcttcacagtatgtccaggcaattcctcaatgggcccgatcggttcggactccatcgtactctccgtgtgcagctcgggtcgagggtataccagcagccttttgcggtagtgtaaagtccaggcctgacggaggatccgaaaggttgtgaggaagaggtcccacggctgacgccataagactacagtcaagatgtttctgatcgtgatgggcacaggcgatttcctcttgtcggggtgattcaataacgcggcatatagcttggtttccttttcctgtgtcaattgattgagggtgactttgattctaggcacggttgcagactttgcaaacgggtcctgaacatccagcctgtagaagcctgctcgattattgaatggagagacgtgaaaggttcgaggaaagatccaagcatgatcatgattgccttggggcgctacttcgtcgtgggccgtgctgagcacatagagatgcctgacaggtcacgaaagtgaacgtcagcttgacattgatcgatggtcgatatacaaagtacgggggcgaacgtacctctcctcaaaggtattgtgcacttctagcacaacgcacaacaatcctgccgattcttggccatccccgtccttgtagcaaaagtacaccgacaaagggttaacaccaacaaacccaaggtaggagggcatcgtaaccatccagacccgtcccatctcttccacagccacgccgtgcgtagcgacgagcgttttcagctcttgtttccatgaaccccgtaccggcgtcttctctcccgtgctgggcgcaaggtaatgctcgtgctggaaacccaagatcgctttactcgtcccataacgaaagaatcggagagaagtgtcaaggttgcgagattcgagttcgtccaggtcgatgcccatatagatgagagggtatgagaaggcgtgtttcgcaggcgtgggcaggaggcgtcgatgagaggtaatgcatggtagaagagcggagggtagaggtgaatgacggggcaggctgaacatatggctcatgaagtgctcgtcgccggtacgatcttttttcccagagaagatggcggatcagtcacgtatcaaagccgtaacaattgtctggcatgaacttactggtcttccagcgtgccatccagcctccgacgatgacagagcagactgcgccgaccccgaccgctgccaggagaccatacgatctcgcagcacgaaaaacatcagatgaccggacccctgtgaagcttgaaagtgatctctgcatcacggcattgagacttgaaagttagcccaagtatagagcgcttacgaagctaaattcacctcgatatgttcgttgggatcgacacgccctggatctagatctaagtttgtagataccagccatgcaaggagacctgacagcccgccgacaatcgcaaaagctgtgctggaccacgcagccttgatcgccgaattaaattcactcggattggacatgccgagaggaccaaaaatcttgtgctggtactgcgtcgatgtgcctcgcagctagctagctagcctcgtctccaccgatagcctgtatgcggcgggttaaaatccctccgatgacttcaaatgtacacagtggatatcaaagtctttcaagtgagatgtgctagctttgcacaaaggagagttgtacccaaattcaacgttaccttctgtctttcgatatcgacacacacaccacgagtttaggcgaaagccgaggatcgacatggacggaagcagaatgaaatggttacggaagcaaaagcgtaatagaaagggaacttggtttggtgcatagcgacatatgcatgcattcggtttcttcatccgtcatacaccttaccgcgtcctcgtatgaacgaccactccctctcgcttcgaaccagtccatatttcctgactcttgccctcttcttgtactcctctcaacgctgccggccgccacttgcgagaccgcgagatggccgaaaacgctcgacctaaaccccgagctcgtgctcgagcagcggcttcttcagcgaccaccgcggctttagctccaagcacaagcatatccaatggtagtctgactctagagacggggaaagagagtaatgcctccaccagcaaccccaccaggccagatgaagatgacgacgatgacctctttgcgtaccgtcgtcgcatgattcgcaagctcgccagtcaaacggtcactaccccctcccctcctcctacgattccgactcaaggatccggatcagagcaagaagattcgggtgggaagaagagaaaaagagtcaaaagtaccgattcggattggacccggactggtatcaagttggcattgagcagaaccgctacaccggacaataacgcgttagaatccgaggatgcgagccagaggtaagtgaagcgtccaatgttcgtttcgagcagacacctgatccagcttctcctctgctacaattaagcccagtggtacctgtccgagccagttcgttggcacgctcggatcatgagctactcgtcagcccttcttccgcgacgacggatcttcccaccacgttaccagcacccttccagccagacgatgacgaggatgacgaagacgatgacttcgaacttcctgcactcgatcctgtactcatggccaagattcaggcgaggcatttgacggcgaaagcgttgagcagttcagatgttcggttcagcggggaatcatctgttaacaagaaatgtcaggtcatggtccagcctaggctagatccaaagaaagctcgatcaatggacgagaatgcgaaacagaaatggatgacaaagaaagctttcgacgcgcccagggtaagtcattccagagtgagttcaaagctaataccgcagctaaagcgtgaggtgaatagggcgaacctctcacctcaatctacgaaaccttggggcaggtcttggacatctccagtcccacaagcaacatcgtcttggagctcgagaaccgggcccggatatggtcatgctacgctacgcctgattcgctcaatttcccggaccctgaagcctcactgcgttcgtaaagctgcaggccaggaaaacgctgcttcgtatcatgtgctaatcgatacccatcctttcccgttggtgccatttgccttctagtggcgtatgagaggacctattacgatgaagttcaggccgagcgtcaagaggcggaacgtttacgattcgaaggccgtctagcagacaacgagagaccgccagcgccggtctcagctatcgcgtcggatttgccttggccaacaggatcgacaacacagcctccttctggcgagaaatcaggatctgctgggcatgctctagctagtacggaaccgattgaaatcgattccgattcggaatccgagtgcacattcgcagcagcggcagctcatgcaagggccgactattcttctgacatcgagatagtagacatgccgcccaagttctacgtcactgctcccacatctcgcctcgacaccgctgcagggtccgaaccgccagcgaccccatcgagcatctcggttcagattcggggcaaagaaggtgaattgaccgggagcgtgagtgcgactaccacgtacgatgcggttatcaagtggtacgcaggcaagatgtcgataccagtcgagatgcccgccactgggaggggaaagagtaaagtccctgcaaagaagttgaaaatcgacttcgatggagacctattcgacggcgatggaaaaattctcgatctcgatctggatggtggcgagacattagacattaaatatgtatgatacaactgttgttgcgatcacgacggcgagagacgtggtccaccgaaatcgaattataatccgtctctgagccattgcatcaaggcaggagtgcctttttcccagtgtcttcgacttgggatccggaaatcgttgttttcgaccagcaacgttcgtagtgggagccaaccaatctcgttgtgcagcctttgagatcgatcactgtgcgcatcagctctgatcactcagacgaattcgtggcatgggattctcacttggaaatgacgttgtctcgcacgtccagctcttctagcagcatccggccagtccatgtaccggctcggacgtgcctagcaatctcagtgagcccatcaatgtcattgattctggcacccttaagatttaacgttttcagtccgttcgagacgagtcgttgaacgcctttaatatgggttagacgagatccgctgagatccaaacgttccaagcgaggcatggtttcggccagacagtcgatgagatcgtctgtcgattcgagggagctgttgacgatgctcagctcctgtagttgtgccaagcagctttcgccaagagggaatcgcagcgacgtgagaggcaggacgtcgatcaccactagcctctggatcgtacaaccttcgggcacggcgctggcgcaatttcggagatcgaactctcgattcgggcttagcaaatctttcccgtttatcttgtctatcgatatctctcgttgtgtggggttgtataagtgtcttgcgagacgagtaccgcaagagccggtgatcaacggggagatcgcgctatcggtccggtctgccgaggatgaatcgcctgtcgggcgattaggtcctgctgtcgcggcggtaacgtgtgtcgcctcaggtaaggggcatcctgtcatcacctaatgtcggaaagacaactcaggtgttggagtgactagtctccagacgttcggtgtgctcaccagattgattccactgcgcgacgcaaagactgctgtgatttcatcctcgtcctctatctcgttgtggcttaaatcaaagtggacgaggctgttccacccgtcttctaggccgcatcgtgtcagagactggataccattccgagccacgatcactttcttgagccgtcgacacgccgccaagctggtcacgtcccatctgcccataaggatgttcccactgagatccatcagttccagattttctggccatgtatcaggcaagctggagtttgtcaacttgttgccctggagcatcatttgcgcgaggcttggcaagacgacatccgtgtcctcggctacaaacttcgagcgcgtcggtgttccggggaaagaagtcaaaaaggcgttgtctttccgaaagtcgaggacagcctgatcgggacgttcgcccgagaggaaattgacctctacgagagaattgtgagacaggtcgagggtgaccaaagaaggcaacaggataacggatttgggtataaatcggaacccattgtgtctgacaggtaggccggtctttcagcttgaccgtaaggcagtcctgcggcgaagtgactatacgcacgataggtctaggaattccaattccctcaaatcgattatgttccttggaagttcgtcgagtagattggatcggagcttttgggtaagatgttagtgaagcctcgaccgcagtcgatcaggaggcccggaaactcacgtccaacgtcctgagcgcgccgaacatgccgatatgagaatcgatgaccttcagcatattcccagacgcacggatgacagtcatatcttcgcgttcatagaaagggacttcgtccagccgtctcttggtctctgagctggcttgctttgacagcacgtgtggaggtaggtcactttccccaaagccgctttctccagagaaaatatcaatcaccaggcgagacttttgctctttgtcgcctgcaggatcgggaccaaggtcttcttctgacaggcctagcacgcccgtccatagttctctgggaaaactttcaagtcccatattcgcaacgtttagtttgccggttctggaggccttcacgagagtctcggccaaagaacgtccaaacagatcttcggggtcatctgatgtccggcaggacagtccagctttccttgtggcagacggctcagctcgtctaggagagtgctttgctgccagttccatctcgctgaacatgtcttctaagccctgttggtccatcatcgatccctgcgatgttaccggctgcagcatctggtccttcgaggaggactcgctactgcccagtctttgcatttcccggcgtttcgcagcaatttgagctcgaagcgtcgatcgtggcgtggaaggtagagctggtagagagggattgcgttctggagtcctgcgacccgcattgctgtccaagttcatcggtcggggcgaagcgtttgatgaggactgtatacgcgtggggctcgtcggctgatacgtgcgctgtatagtcccaacccgaggccgcgatggactcttctccagagagatactcgagactatcttctggaggttcctaggtgaggacgcactcggtctcgcagagcctgtagccacaggctctccagctcttatactagagccgcctttagcgttcggggacccttttgtcaaagatggagctgagcgcgtcgttgcgatcggggatcgcactgagctgtggccatgactgttgttcgaagtagcaggtgaaacgcagaccttaatcccatgactgatcgaagactttagaggactactgcggaggtcggacaacgatgagacggtcctcaaattcgacgtcgaggagcccagagccggtttccgctgagccaaccgcgggagacgagagatccgggatatgggctgattagccagagcatcgccctgaggaggaatattcatttccctcgacaccgtatgatactatgatatcgatttctgtatcgtccgaagttgtttggactgaccggtggtacagtttacgcttataggtctttgatcgagtggaaactggatcaaccttgttctccttcggatgctaatcgagagatttgttattgtcccggatgtaaatcaagatctactatcgcccacgtgactaatttggatctcgtattgggcccatcaagccctgaacaccagagtagtgcaagaccatctcgtagcggtagcttgtcagcgcctgcacaatatacgccataaatcgccgagcggtgacataggccagcatcagagatcaacgaaattgaccctctgtcaatttttgggtcggtctaccttgaatctctttctttttctcgctatctacgtcagatactgtggcgtacagttggctgaaatcgccagtatccagcgcggaggaaagtctcttgttttcagactggctgacgtggagctgaaaacgcgtcattggcgaaactgtttgcaagaggttagtggatccctctcagctattcgaaatccgctatgaacctattcctaacgttccgattgaggtgtcgcgatagatttccgacgagatattggtccccggagagtcttggcgtggttcactcgagcaactcgccctgacgacccgggtcagcagaaacgcgatcaacacgattgatctacggccagaactgtcgaaacaggaacacgaatgttttgagaacttcctcgatacacttcgcgccagcgatagcgaattacccaacttgcagctgattgccgggccggtccaggcgcggctccggatagcccaactctgagatctggtttggctaggggatcgggtgagatggaatctctcgtcgcgcaaggcaagaaaccacggctgtcgtgagtgacagaaacaatgagcagataacaatcagatcaacgaatggcagctggcgatcaaccaatctagatcgctagagcagactgaagaccccacttatgaaatcacgatacggcaatatctactaagcttacgagaactttttgacgatgtcttcctgtatcatcgatagctgtcagcgatctacagccacctcggcagtattttggccactcgagatccaacagctattttctgtgtttgtgatttgccgggtcgagctgatacgagctggtcctgtacccacatctgatgacgtctgtttgacacgctcgtgtaatcgctgctcttttctaagtgtatacaactcggcgctggtaatggcgtatcgtgcacctcgccgcttcgaagcgggtcaatcttgtagcaggaagccgatagctcgactacggagtctggatcagcgagggtttcgatgctttattgggtcgtctatcggcacagcaggccacctcgcacgcttgggcttctgtgcgtagagctgccggggcgagcagaacattagtacctacctgcgggagctagtccatgttttccctcctatcccagtgaagcaccagctagctacgtgattcttgctacaagattttacttgtttactttttgaacagttttgtgttttatcatggcaaatcccaccagatgatgggcacaccttgcacgaacggaccgctttacacacaacaccatgtctcgtattttgactgttctggggaaggcatccaacagtggtgagaatgacattggaaaatcagcacggggttgctcaaatcgccgatgggtccaggtgcagtggcgaccgagccagaatttcccggacccttcaagagaaaaagtgacaacatcacattgtaatcgcctttgccttgttccttgcgcttgttccctaagcaatctcggagtagctttatgcgagctgtgcgtatagagttcgttacgttctatcataccatcacgtctaacccggccccgaatcatagccatacaagtttgacctggtccttcgcggtgaccataaagatcgcccgtgtcgagctgatatcaacctaaggaggtaagtctcaacggtccacttgtagggctaacagatgcgggaactagacacacactgcgaagaacctctgcctgggcttgaaaatggtatgttcgaaccctcgtcgccagccgggtaattcttagattgcgtggctggacaggcaaaagcagcaaccaaaaaaacggcctccaacaatgaagcatacttgcgcaacctgcgcatcggtctgctctcagtcaatgtcagctgaagcattggatagggtgcggaacagagcaaagtagactgagacatggctttcttccgtcaggtagcgacgttaataatccggctggtctacaaactgctcaggggttaccctctcatacccaaaggtctcgccctcaaattcctcaactcctcagcccttattgttacgctggccatctatcgacatttttacattgttgggacgccgcagagggacgtcaggggtaatgtcgcccatagcggagaagatctggatggtcaaggagtcatcgaatgggcttgggacacgtaagtgaagggtgtttaattttgcaggttcacgaattgcatgagctccgctcattctttctcccatcgacctagaatctatatcacttggatctgtcaagttttgtcggccctcctgtcgagcaaattctggtatctttggctggcagtaagctttagaccaaaccttgattccgcgaactctgattgactggattcgatcaggcaccgggcattggaggttacaaactctacaacacatttgccccgatgcttcgctcgatgcgaggatcagctggcccaatttcgaatcctaattcaacaggggccgctgagccggacgctgttcaagctggcgaagccacttccaaacgacaggctaagttgagggccagaatggaccggggagataagcgagtgcaacagcgagaggttcgaagggcacaatgaaagcatatattggcatcaatgagccgaggttaatctcgagtcatgcgttcgttcattgtatgtagcaatgcgttttgcaggaccgcctcacatgacgatagacgtgattcgtatactcctgtcctcgctggcactggccaactcaaagtgcgagcctgatctttccgcctggcgccaagctaaccttgatacctgctgtacgtgtcgctcactgacgaacccatgcacgatttcagtcgatgcaccgagtagccagacttctcgtcgtactcactgaatttccaactcgccaatgtattcaacggaacaactagatcgatctacactgaatatcgatacgctgccgctctccgttccgacagccagtatgtcactacaaaagttgagaagcatttggttcaatcaagcaccgaagcgtagaaaaatatagacgggactgaccgatttcgctgttggtctcggacgatgtcgatcgctgtcgcactcgaggtcatcttgtaattggcggcctcagtccattcttgatcttgacctgagagagatgtccaaaccttgatctgtttatcacgggagacggtcacaaagtatgtgtcatcaggagcccaggcgcaatcccagactatccgcgaatgagatcgatccgcggcaatcgcctcgaaacctgcgaacaaaacgctgaggactggactgtaagaacatcagaacgaacgaactcaccctcctcgctccgtttgaagagtcgccatgtacgatctcgagaacaactaaggacatactgtccagagttgctaaatcgtatccgagcgatcgtgagattatgtccggaaagtggagatcccaattgtttccaggttgaggtatcgtaaattcgaattaccgcatgctccgctgatgtcgctttacatgaggtagctaacaagtctccattgggtgatgccgctactgccatgagcttgaatgcaaagaacggccaatcattggtatcggaagacctcgcgatggcagacagatactcacctcgtacccgtgaccataaagtttttcgatttcgggccacaaggtggcactggccagtacagcttccgtcggcagtgcgaacatttccgctgatatcgagacgtgctcgtgattgaagcctttctcctctgcatgagatgcatcttcttgtatggctacaaacggcgcaggaaccgctcagctgcggcaagatcagtgcctttccttggacatgactcacgctgatcgagagctcgattagaaagaccgagtggtggtacactcgccccgacggctcgagccgactaatcgatttgcatcatcagcatggatcctcgaagcgtatcatgaaacggctgaacttgcctccgtgagatcctcgggagtgacaccaagaccgtacaagctagctgcgaatcccttgggggcgtcgaacaatcggactaccttttcgtccgcgccgcttgcaaatctcaagcggtccagaaacgcgacgcacgtcaggtcgtatccatgcacttgtggccgacccagctctccccagacggtggagccttcggactgggatcgacactgcgcgtgtaccctggaagtctgatccgtgctgaccgagaggagatatgacgaagatggatcccaagcgaggtccgcaactgccagtgcgtgacccgtcggtgcgatcgcagatacccattcttcctctgcctcctcaccctcgttacactgacgccatcgctggagaccaccgctccagctattggtgacgacgctgggatctcgacggggcgatcgcgaagtcgtgctccacagcgctccaaacattcccaaactccggcctgcgcctaattcaccgaaacgctgtttaggaagccagatcgtgttgacccccagcccttgcgactcgggagcccagatgatcattgaattatccgctgctgtcgataagagccggggggatgcgtatagaccggtcggactgaagtgcgtattggtgagtttgccttcgtgcccgatcaggagtgcctcgagcgagatgtcataatacgccgacctgtaagcgcagagccgatcagaatggaccgacctctggttgatatagttcgcggagatgacactcacccctggccaccagaactcgcgacagccatgacgtgggcctttgtgctcagttgacgactcccacccgactcgccagtcaccttgcgttcaaactcgtccaacatgtcgtcgtccaactcttcaccgctggttccgacggccccttctcgagctccctcgtccggacgcacgggtgagagccgccatagtcggatatacccgtcctgagaacccgaagcgagcatgacgtcgagctcgccatcgccgccttgcgttcgagggtatgtggtgaagtcgagacaccgcacccagtcctcatgtccctccaaggtcagcgctggtgaaaaggtagtggcgactggtccgttcgtctgggggcgagtgtagaggtggatcttcttctcggtgagggcgacggcgaggacgagatctgaaattccggtggtccatagctgggtcagacagactgcggtgtttcaacgtcatcttgacgagacgtacctctcgagtcgggcagattagttaccgcgaggtccaaaggcatccgacctcccatcttgagggattgcaattcctgcacctcgatctgcactccatgtcccttccagcgataaacgtgaacgaccccgtcgtttccacccgacatgatgagccccgttgacgcatcctctcggtcagtgtacactccaagcgaggatacggatccctcgtgcgacttcttgctccactgttttcggtaagcaaacggatcgccctgctcgtcctcgggtatccaaaggatgatgtttccatgctcgtcgccggacacgatcgggcagctcgtggatgcatctccctcgtttgagttctgggatggtagtgagatgtgcttgaccgtagtgacctgtgcagcatgtccaggaagtgtcttgctgatcaggcgaccagtcgggtcctatcgagattcgagccggattcatcatctgcgagtcgagttgtagagacctttgacgtcgtgctcaccctagggtcccatagcgcaacgacgtgtcctgcaccaaaggctactattcccgtaataggatctgcagaggagaccgagcagaaccggttggctccgaccgagatgtattccgtcttgcaggagatgaccatgtcgtccgatgctttccttcaagctattcgagaggtcgaggtgcaagagccgaaccagggcgtcgagtcaaagcgaccgagtctatcgtgaggggcagcttcttgctaggccaggttctcactctgtgatgcgaccaagtagaggagtcaatgtggcaaggtgaagatgatacgagtacaagtttgaaaacatgtgaatgtcacgacttttacccttctttgcctgattttggagtgagcgacctcgggcttcgacctcggaaaaagttgaaagagagggaataatcaaaaaggagaacataaacatgtgatagcattcgatcgacttttaaattgcagctataaccctgtactctggatagacagactatcccaaacattagctgcagagatcaagctgggaccgctatacctgttgacctctcaacccatcgaatccgtcacggtgacaggtttcactcggtccgactcgtcatcaagcagtaggctgaacaactcgccacgaatacgacaatcctttgaagactcgatcgtttgatcgtctactgagtcgtggtcaagtctcaagtctcagggccatacgagaaaaaacacgactgccatgtcaggaacaaccagtactccgcagatcttcccctcttcgaccatctccgaggataccctgcattacaccatccatctacccccgaattcagacctaagctccgaaagctatgcggctctgataacttcccgggttgattcgatgttggcccgatattctcctttccaagatgggacctggctgtggcacaaggacgcttgggaactcaaggtcgtccaagaggtggacattcaagataggaggttcgagcgaggggccgaggtctcgaaagtacggttcgaagaggaccacgaacaagacgaacgggaccaagctatcgacgacggtgaaaggctgaaagagaccaagaccaccagtccagcgtggagaaagttggaaggtcggatgcggataggggattcggtggacgatgaatggctcgtcgtctggctgctgcgggacatctcgtctacttggccagaactgctcgtatcgtgagtcgcctctacggcccttaaagccactgctgaaatctatggcggagcgtacttctcacaagtagagcagcacatactgaccggattcgctgccgcaggattcgggataccgatggcgatttcttgctcatcgaggcggcaaaccacctgccgaaatgggtcaccccgacgaatgcgcaaaatagagcaagtcgtaacactgatcgtcaacgactgatcgccaagctcatacttcactttgttctttgcagctctggctagccagcggtcatctccaccttattcctcctgaccatcgttcacccacatccacccgacctaaatctttcgaattcgaccaaaacgacatctcgggtggcgcggcggacgagggcgacgatgacgatcacgcttggctgaatgagcatgatgcgacgaggctattgcggaggtcattggacgtttcgacggatgggcgtggacagtttcatgctcctgacatcgaggatgatgtgtgggagaggatatccgggtatccagatacgttgaggactcatcatcatcgagcgcgggcctatttaccggtcaatatcgccaaagccctcaaagcaaacccggctttgggtcagcgagcggtcgaagggttctacacccgggatgcagcccagttgcgactggcttccagggcaacgaaattcccacctacccctgcatcttccgtcgtcctgacccctctcgtctcgacgaggacggcctacgctcagctcaagggtcaggtctaccaccctcctcgagtgttcggcccggagtggaggatccaggttgccggggacggcctcgaaccggaagagagggaccgagcggagcgggaacgaaagtaccgcgatctcggggtcaagctcatcatggggttcgagatcatgttccgggaagataacaagcggagtcgtcgtcgaggcggcgagaatggcgggtatcaaaccgggatggaggaggacccgaggcaggacaaggcttacgtttcgtacctcgagaacctagccaaggcgggatggttcgagggagagatacagggcagtgctgagtatcagatcaaggagaaaaaggcagcggacgcttggagagaattgcaggcgggacagtgagttgacgaggatcggctctaagtgagggccagtcaatctgacgcggatatcgtgtctataggttggaagagcgcacatccttcgcacaagctgtcgatgatgccttggcacagacgagttctctgaacacggatgaactagccgcatcatcggagagtcaagacgactccgaggcttggttggaggtgtcccctgatgaactcgacgggatgctcagccaggccgaagcgggtcaggaagctcggccgcccgtagtcgatcatgtcgaagggcgtcagggtggtgaagaagccgaggcgactgagcaggccaaggtgttgagtgatctggccaaaaaggtcaaccaatttgttgaagcaaaaggcgggatgacgggagcaacctttgatgagtaagtccaagagggagaatctgatgtcgcttgtcgtacttactctgggcattctccttgtcagcgaattatcggacgacgacatgctgggcgattcagatgacgagtctgatgccgagcaggatgacgacatggaaggaggcgagcgggaacgacgactcaatgagctcgttcccggtctagcgcctggagaatggggcagcaagacccagaagggcgacgagtctgcagaggaaaagaaggtcgattccgctgcgaaacccaagcgcaaggtgtcgtttgcagctggaaccaaaatttcagaggacacgaaggacggcaaggccgaagcgatgccttctatccggccgcccatcctcgagccggagagctatgacggtcacgtccctgaatccgacgacgatatgagcgattgggatccggcagatgacattgtcgcaggatgggccaagcgaccatcctacaagacgccgaaaggcaaggcgtccaagaagcggacgattgacccgagcacgtacgttttgcaggaagcgctccggacgggtcaaccgatgccgcgagagaatttaaaggcgtttgacgtgggggacaagttggacatgtccgatgacgaggatcaagacgacgatgacgaggcacgcgaagaggcgggactgggcgagccagatatggaagcggaacaagacgatttcttgcggttcgcgagggaagctttggggatcaatgacgagatgtggcagggaatgatgggggacagaaaggcccgaggcggtgagtccgcggcgtcgcaagtctcgacatgcttcaagtactgacgttcaggagcttgtgatgatagtctacgtgcccgaagaggccatgtcgtcatcggcgtcgcagcccaaacccaaggtgccggtgcgttcggaaactcctcgcgctgaacctcccgcctcgaccacgaacgcgacgccacagaggaaccccaagttggactcgtttgagcgtgtcatggacgccatggaagccgagctagctctgaaacgccagggtcgcaagcccttggcgtccacgaagaaaccgacgacctcggcctcgaaacccgacgtcgagcccgcaccttctcggctgggcgcgctcgattcgctaccaacggaagccgacctggacgacatggatgaggacgacttgatcgccatggaccgtgagctgcgtgcggccctcaagagcgcgggtgcggatgacgacgaggacgacgtcgacatggaaatgatggatgacgagacgagacgagcgatgggttcgctgggcgagagtgacaaacaagaggtcgagatgatgaaggatctgttgggaagttacaaggcgcaagccggatcgagcggagtcgtcggcaacttgtttggcaggctgaacgagaagaaggctgccaagtaggagtttaccattgagcgatgagcaagctgtatcaggtagcctcgacgatgagattgtcacgacgaacgcattgcggggcaggcgacgtcgtattggtcgatctaggaaagcccgcacgatcgttccctgttgctcaacatgccgtaacccacgactttgttttcgttttctccattccattcttctttttacacgcatcgtcaaaaagcgatctgtttgcgactctgcatctacacgtttcttcccctttcccgctcgacctgcccttcccgtggcgaacccgaccgcgatcgcacagggtatccgtaccgtccgtccagtcccattcgtctacacggcctggaacatgacatccctcccactgtcgcttcggctcgacctggctccgcgtccacacatctccttgcctcggcgctgatcgacttggacgtcgaccgcttacatcaagctaaactcgccgaacttttcctatacgaggggaggccaggcacaagcgcgaacatggtcagccaacctagactcgtcgactcccgtctcgaaactcgtgactcaccctgtatccggggacgctccatttacccttcttgaccatggtctctacggcctttgtgatctggggttgagcctcggtgacctccttgacggtcaaatcctcaaacggcctggcatccctgatattactgagggtggcctctagaccttcctgctcggtctggatcttctctaccgtcttctttgcggaatccaccgctcgggcttcgaacgcgtcgacgaccccggtgactttgcccaggtcgtaagagacgggtttgaacgaggagaggacctgctcggcttggttcaaggcggattggtctttgaggacggacttgtaacgcgcgaggtcgatcgtaggggtcgagctgaccagggcggcgtgcttggtcgaggcggcggcgtgacgggctcggaaggcgttaatctcggagacggtctctgtcagggtcaggggcggggatgaattggagtgtaggaggggggggggatgagtttttcacgtcgcacgggtttgagcgtcgagcgtcggggactttgactcacccttgcccaaaccgagaccgctggcgatcttggtccagtcctattgtcgtacgtcgtgtgaaacgggggatgaagacggaaagcaaagaatagagtcgagaaaatagtcgaggcatgtcagcgttcacatctcgatagttgattcgactcgactcgatccgatccgatccgatccgatccgacttgatccagcagcacccggatgtggggagcaaggactcgtccgccttttcggcggtgctgatggtatcggtcgtaccccgctaccatccccgtcgtacgtcccgtctcatccatcttctttcttatttgattctaggcggacgagtctgaccgggtagagagacatttggacgtcggggggggtggtggttgcgtccgacttaccaccttggaagcagcgctcctagccgacattttgttctatacgtgtatgtgtgggtgtgttttgtaggtggggggaaaagagaatgggaggggtggtatctgtgggtatagattgggtgttgtgtgtctaacttgatctgagagactgacttgattcccccgacgtggtagtgtggatgcatgcagggtgttttctagggagagatgggctggtcggttgcgtttccctctttctcacgcgtccatggttgatctccttaaaaccaaccaacccacaagcaagcaagcaagcaagctaggtagcctcgaactagactcaacgtcaacaaacacacgcaagtacaagagtaaacaaacacaccaaccaccacttggtacacatcaaccaagtacgaccaccccccacccccccccctgacaacaacaatgtccactcaacaaccctcacctaaacgtcgtctacgtccagccagctcggacaccagagtattcacacgcacttcctcggaacaggctggggagaaatacgggatagaggatgataccacttggaaggtatttggcgtcggagcgaggattaggcagagtgagtagaggcgagtcgagtcgaggagttataggtgtggactaggacgaggacggacagagccgagtggtagtgattgtctgccgagctgggacgcgcggggaaaggagcaagtcggtcgacttccgacaccgcgtcgaaagtctagcgggatcctccacccgatcattcctgaacaacgtcgatcggcctgcctttcacaagaagagacgattgcggaaacgagctgcaaggtgtcactcgatccgtattccggtactaaaccgtaccgtatgaacgggacatgtcatcacgacgcaagatcatccggcgatgctcgcgcttcgaccagcctccctggggttgaaagcccacccttatacctctccgagcgcgacctccattcctagatcggttccctttagacatttttgaaacctagactgacattacacttctctctctctcttgacctcgaccccgccctcgctctgtgatagacgtgaccacgggctaccaaaccgctccgacctacacccgtccgatccccatctcgggcaacccggccgtggatatcgagtttggggaagccgagtttctcaaacctacacccacgtccacgtccacgtccatgggcgggggcgggggtgtaggcagcgcttcgtcttcctcggattcgatcaccgcgccggcgggagcccggtactttccccgaagcggagccggagccggcgcccaggtcgaagtcgacgaatccggaacgtcgggcagggaatggactcggtaccaatcatctcctaacccccgtttcctctcctctcaacccctgacgcatacgcaccatacccctgcctacgcgtacgatccccgtgggttccaatccgatcgacaggtcttggataaagcgcattgggcgtacgagcaggagaaattggaactcatggtcaggcggttgaaaccccgggtcaagggcgagctgagagggatggcggacgttttcgtacccggtagcgaacccgacggccacgggcccgggcacgagcacggtgttgaacgagatcaaggatggggggacgagtttgagtcgacgaggggtaccaagcgacatgctgggaaacacgcccgatcgaccagcgggtcgggcggtcttgctgtctcgcgcgtcgtaggtgggatagccgaggacgacgatgtggatgcggatcaagggatggccagtgggacagataccgacgagcctagccagggtgcgggtgcgggtagggtggatgacgagttcgagttcgggaccccggcattcatacgttctaggggcgggttgaggcctacgaaatccctcccggctaggagtttcgggttcggcggatcatcatcctcggcagcagcagcagcagcagcagcgacgacgttgatgagcccgtcggggatgggaggattaggggacgggaccccgatggccgcccccttcacctcggggttcttcagcccacacgtctctaccgcggatttcaccgggtcgatgggcatgcatgtcgagggtgccacgtcggatcacgaggaggaggaagaggacgggttcgacatggacgtaatgtagaacgaggggaggggggggacgtacttgttgctaaactggaggtgagttaccggcctcgtatgcccactacacaaaagaggctggatcttgccgctcgacattattgtcgtaagaaaaacgctcgtttgtttatctagatctaggtgggctaggcgggctaggtgggagatgggatgcaattcggatccggcgtatcacgggtggtccttcgtctcgtgggtgttcgttctcgaatgtctatacgtgctttatgtttcgtttcgttatacgtccctaatctccgttgtccgtttcgtatactctactcgagtgcgggaagccagtcgacgttgtcgcgttgcgggagggagcgggttcgaggtggatgctggctgtccctcgtctttcttttcctcaagtcgggaataggggaggaaagttcgttcgttatgttcggaagagcacgagttttgaatgttctaggtggtgcagagctgatagcagctcagggcaaagataggtggtaattgacgtcggtatgaaggatcctttgtcggtgtgtactcgttcagagatagaagagctcgcgtgacgtcggaaaggtggctgtcgaaccgagttttcgttgccgaaagatgtgagagggatgagaaaaggattgtatgaggacaggattaaagatgatggaaactggtggagtgatggtcgattgcagctcttcgtcacccgctgaatgtagaggtagatcagagaatagtcagagtagatgatctgccaacccctaactcggatgaatctttatttgataacaagatggtcaactgaggtaatgaatattacgtgatgtggtaattatgacgtgtcaataccctacacccagacagacatgtgacccgacccatccacgcgtgagggtacctccactccgatcctcccccaacatccacactcgcacgcacttctatctaccatctacctacctacactcgaagagatactttgaaccacatcaaccacatcatctactcacactgccgagctcatcgcctaccatgctagaccacgtctccatctcccacgagagtaagtaacccgcctcgaacccggtctacacgtcactgataccacctcgtccacccgaccgaaacgaccaccaggcggtctcgtcctctggtccaaatcgtacaacccggcattcgagaccctcgcacaatcgtccaccaggtccccggtgaatacactcgtcagggatgtcatgatcgagaacaagtcggccgacccggaggaaggggtcgagagggacgggtggaggatcaggtggaccgtagagaatggactcggactcgtctttgtggtgagtctgcccccccccccggcgccgctgtcatccatccgggattagacttgggtgcaaggagccacgtcccacgtccctcgtccactgatcccgtcctgctttgcatgtgacatcgccctcccgcgtcccgacaggtcgtcttccccgctctcctcccgttgacatacatctcggacctcctcacccgttccaaatccctcttcctctccctctttcaaccttacctccaagccctcgtcctctccctctccccgactgacaagaccgccaacaaattcaagacgagccacgggcaagaggccggtgatcaggccttgagcgagttgaaaagggagatggtggaccagcgatgggccgagatctgggagaggtgtgtcagagggtgtgaagaacgcgctgatgggaaaaggggaggaaaaccgaggaaacccacccacaagaacaatgtcgtcgcgaaccccccgaaatcgacctcgcagaaacctctggctcaggaaaaggagaaggacgtgacgcaagaggccgcagggttatctccagaggaaatcgccaagaacgttcaagccctgaaaaacaggctcaagggtgcttcttcctcgggaagatcttccccggcacctcaagggagcgggacggccagcccgagctcgaagaaccgaccttccggtgccaagcggacgacgtcgacttcgacggccgcagcggagaagatcatgaggaaatggggcacgaacggggacgcggtcgaggtcacggctgatgcgatgagggagttggatttctccgctccggaccctagggaacaggacgctccgggctcatcggcggggaatcgtcctccggtggacgtcgacgggttggtagatcgagcgagtatgggccaggtcggcaaggaaggcttctacgaggtcgccgattggggggtctccaagatggatttaccgagcgaggaagagatcttggcccgcggtcgacaacgggatgggaatcaaaaggacgggaccgggatccccacgacgacgtcaactcgcaagggggacgaaaaagatggcgactccaccgccccgtcttcccgacttgccagcctattcgaccgactcacggggaaaaaggtcttgagcgaatccgacctcgacccggtcctccgcgagatggaaaaacacttgatgagcaagaacgtggccaaggatatcgccgagaaactgtgccaaggcgtgggcaaggcgctcgtaggcaagaaactgggcggaatgtcgagcgtccgaacagaagtcgatgccgccctctcaaagaccatcacccaggtcttgtcgcccaagacgtcgacggacatcttgttggacatcaagcggaaagcttccctccccctgcccccctcggcggacccaaacgtccagccgaaaaaggacccgtacacgatgacctttatcggggtcaacggagtagggaaatcgaccaacctcagcaaagtcgccttctggctcttgcagaacaagctgcgcgtcctgatcgccgcgtgtgatacgttcaggagcggggcggtcgaacagctccgggtgcacgtgaggaatctgggggcgctcgagggacagataggtcaaggagctggcggtggggcaggcgcaggcgcagggtatggagccggagggcaaggtggttcggtcgagttgttcgagaggggatacggcaaggacgcggccgggatcgccaaggacgcgatcgcccatggtaagtcgaaacgcgtcgagctggtgacgatggacttggacacgatgactgaccgggcggcccgctcgttcccgactcgtctacagccaaggagaacggattcgacgtcgtcctcatcgacacggccgggaggatgcaagacaatgaacccctcatgcgggccctcgccaagttggtcacggtcaacaacccggacaagatcgtctttgtcggcgaagcgctcgtcggtaacgaagcggtcgatcagctgagcaagtttgatcgaagtctcaaagatttctcggccgcggcgtttggggtcaagggcaaggcaagagggatcgatgggatgatcttgacaaagtttgacacgatcgtgagtttgacgagaggggtccgattcatgattcggggacgaagacgggctgacgagagatggctccgattgatcgtggtaggacgacaaggtcggcgcggcattatccatgacgtacattacgggtcaaccgatcctgttcgtcggctgtggacagacttatagcgatatcaggtctctccgtgtgaatcacattgtagaagccttgttgggcgcctaggtgcatgtcgaacgttgtatatgatgacatcttgtctctatttccaccttttacacgttacgttatcgttacgttcctcttctattttgatatttccacctgaatgttgtcgattagccatataccgtaccgggaacaatccaagagagagcattcactcggggaagttgcagcaggctcgataggtcgaccacggtcatgtcggctgaacctcttgaccagggttagcacacaaacagcaactagtgagcaggtggattctcgtcaatcgtattggcaacggaacgattcatctcggcctggagcacgacgtctgccaagatcaacgatcagtctacttgtcccgacattccgacctagatcaacaaaacatttagatagatacgagcaatagacaatattcaacaggaacgcttcagcggactcgagctagctaggacaacaacagggaaccttcgttactctggtgcggcattcgagtcatcatgtcagggaacaatatcaaggtcagctttcgcaaacacctacctaccacgcgcgtgcagccgagtccgtttgatctgatcgtctcctggccgttctatccctcgacccgcataggtcgtctgtcggtaagctctggcaaccgccattcggaaacctcgtcctgttacccgaactgatttgaacccctttgaaaccatcgctcgaccagattccgaccgttcaatcgactggaaacggagaacggctcgacggaatgtatagatgtcctggacgaacataccgtgcgaatgaagaatggtgggaacgtcaacggaccagaaggggacggtgtgtggaatcctttgaccttgcgaccactcgtacgagaagagctgattgaaatctggtcgtcgtcgggatgtccggatgatagggtttacatttgatcgggtgtttccctctccgacgggccaggccgagatctttgactttggcgtcaaagggatcgtcgagggtgagccgataacccgcagtcaccgaggctgttcaagatgctgaacagactgttcttcacgttccagacgtgatggagggattcaatggaaccctgttttgttacggtcagacggggagtggaaagacgtttagtaagcaccgaacagcgggtcatgagaatcgcaggtgctcaaatcgtcgaaccttttttctctcggaacagccatgatggtacgtccagtcagagtgtcctcttgaccaaagttgtactgaccagcatacgatgaatcgcggtcgtgatagggcgcagacattgacaatactgaactcaagggtctgatcccacggataacggagcagatcttcgcctcgatcgcagtagcagacgccaacattgagtacacggtcaaggtcagctacatggaaatctacatggagaggatcaaggatcttttggcccgtgagtcgtcgtcgagatgatcccggaacggctgacgctgataggcgtctttgcgaggaccaacagctgcgaacgataatctgtcgattcacgaagagaagagtagaggagtttacgtcaagggtttgacagacgtgtacgtcggctcggaaggggaggtgttcgacgtcatgaaggcgggagctaggagccgggtcgtgtcgagcactcgtatgtcgtccaacacacttgaccagctttccgtactgatacaagggggacctaatctacagagatgaatgcggaatcgtcacggtcgcattccatcttcttgatcgctatccatcaacgcaacgtgagcacggggagtcagaagagcgggaacctgtacctcgtcgatttggctgggagtgaaaaggcaagttcaaggtgattgtgatctgcagatctggcgactgaccgcatcatctgcgtgacaggtcggcaagacgggcgctagtggtcagacgctggaagaggcgaaaaagatcaacaagtcattgtccgccttgggtatggtcatcaactcgctgacggacgggaaatcgagtcatatcccgtaccgagactcgaaactgacgagaattctgcaagaatcgctcggaggaaattcgcggacgacgttgatcatcaactgctcgccggcgtcttacaacgaagccgaaacgcttggaacgctgagattcgggatgcgagcaaagagcatcaagaacaaggctcgtgtcaataccgaaatgagcccggcagaattgaagattctcctcagcaagaccaagggcaacttgatgtttgtcgagagttaccgggacgccctgctaggcgaagtcggcgtctggcgagcggggagcaaggtcgaggagagcgactgggccaccgaggacaaggtccgaatgctgctcggaagcgggaatccttctgggaccgtatcgagtatggctgctaaacgacctggctcggcactgggaccgcttcccagtcctggtctgtcgtccagcgtgaccagccgcgcagcgacgcccaacctcttggacgcgttcagggatccgagtgggcgagtctcaccggccggatctgccattgcgtcgagactggatgccgatgagagggaagagtttttacgaagagaaaacgaattgagcgacgcgctcacggaaaaggaaggaagcctggccgctcaagaaaagctgatacacgagctgaggcaagaactcactacggtcaaagaggacagcgatcgttcgaacaaggtgggtgcaaagaaagacgctcgaccgtatcgcgagctgaaattcccgtcatgtccttgcaggctcacactgcgcttcagctcgaagtcagcgaattgcgagtggtacaaggccgactagaagaggaagtacgggagaacggtgctagcttggatgtcgctcgagacaaggaaggcgaactcacgagagaggtacaagggctgcgcctgcaggtcgaggaattgcgactggcgaaagcgacggcggtttctgatgaccgagagaagcgcaaggcggaaatgctgtccgagatgatggcaaagatcgaaacggtgcgtgcgatctcgcctcctcgctatctaggcgagacggaagagttaaacaggtcttctctacagggcgggaaatcggctggatctggttctgaggctctccagtcgctcctaattagactggacggcgcggccaccgagtctcgtccgatcgagctcttgtcagagagcaaggacatcattcgccagcacctcttgatgtctcagagcgcacaacgcgattctcaagatcgactgcgtcggctccaggacgatgtcgatgtccaacagcagagacgggaagagctggagcgcattctgttggaaaaggatgccgcatatgaggatctactaggtgggttcagcctagctctgaagcagtttcagttacgcttaatgcttatactgttacatttacagctcaacaatcgatggaagctctgggccctgcggtggttgacgacatcaaggtgagtcatcaagactagcgagcggagggatatcgactcatcagccatacatacataggctcaattcgaggcgcagtatgcatcgaaacaaagcctgatggaagttgaagaggctgctttgcgcaagcgtatcgagcatcaagaagacgagatggtcagactgcacgatacgatcgaggaccagactgcgtcgattgacaacctcaacgtaggtcatgcgcggccggcctagttgtttttatcgttactgatagcgacgttccgtagcgactgctggcggaagcaacatctggagtggaaggaggacgcgaattcgctcaagcggttcaagagctcgagcggaccaagcggactgcggaattacaacaggccgaattcgagtcggtcaagcgcaatctcatgcgtgatgtcacggatcgctgcgagaaggtatggcaagggaacttgccaatcatgagaatagtcgacgatggctgatcggcaaaacatatctaggtcatcgaattgcaaatgcagcttgacgagtacaaggaaaagtacaaagctattgctcggtcgaccaacatcaaagcacagctcaagcgcgcccagatgctcgagtacaacatgtcacagatggaagacgctcaacggagggtgagttatgcatagccgaagactagtctagatatcgctgatctcaaagccatcccatcccgtagctggtctctcaaaacacccaattcaagcgcgagctcaacattgccgagagaaagctggtcgaacgtcgcgagcgcattcttagcttggagcaccgtgttggaccttatgagaatttgaagatgcgagaggatgagttgacgcatcaagtacaactgttgcaaactcagctggctcaggctgtgaggcagccgatgttgcctaatgcgatacaggcaggcaggatcgccaagcctatgcgaggtatgtcgagggcaaccctttcatctcgaacctacttcagctgactcgtcaacatcttgcaggcggaggtgggattgcaaacatacagaacgaaccggctgctcccggtgcgcttgcaaataccaagcagcgactcgcagatgacataggcggtaccagtagggatcatttggcttttctcgtatcgaacggagcgctcacagtattgacatcttgcagtgcgacgacaaagttggttcatgccaacagcgaggggtaacaattaggttcattgtaacgcgcatttcacgaccagcatcacgaatatggaagaaagattgtaggcgtgtccagtgaagcatcagtccacggttcgcaagcggtacagcactggcttcactgctcgtagcgcatttggagtacgagattcggccacactcagattccaagggggacgaaaaatcgccctgatgtctgttcggcagagatgctaggctgacactatatttgatatcttgctcaccaaagtagttgcccctcttaatgcgggacaaatgagtttaacattggctaccaacatgacaaatacgttggtatcggtcgtaactcaaccgccaacatggcaaggtataatgcagaaatccgccagacaagaaagtcattcgcaaaaacaagagtatctagaagagagacagggaagtgacgcaatgacacatgtgggtgggcgtcttctgaatgagaagtctgtgcagatgacatgagtgttccaggcttctgaacgagacctggcagccgaaaccataggtatgccattgctgctgtctttctcaggttacttcttgaatggaacccttgcgccatgtctcgacagcgaccgtcgcctagctgcagccttatgaagctgctgctcaacaaaatcgggctggagcgaaggcatttcagatttcctttggaactgcgtttctctgacataaacctcgaattgctcgtgttgcaaccagagtaggggcaaacgatgtgatggaatcatctgacgaatcgctcgcgcagccggattacaaatatagcgaacgagatggatacaaaaaggagcttagagaaatcgaaataaagaggttgaggatgaaaagaatggggagcgagaattgggctcgtcgacatgacgaccttcaaggcgatcgcaaccgggtcaaaatgtctgcgatcaaacccggcacgtcgttcctctggacggccacgctgacaacctcctcgatatcggccacgtggttcaacatctgttgcaaatcgacaccgtgagcacgtcgtgaaaccgctttggacggcgcggagaaactcggattccgccaactcactttggcgcgcgccagcgtcttggtttccgggtcgtaggagagcatgatcttgacagcatctgtcccgtcggtcaattcttccctacccctcgaaccgggagcgagggtgtattcgagcaagatgtcggtatcggacaagggttgcatgttcttgatcccgtttagacccttgtagacagagatggccgaggtgtacctgcgagagggacgaggtcttgttgatgacggctgcggagaagaaatgacgaactcgaccacgggtgactgaccatctgcacaactcgtccacgctccgatcacccttctcggccccctccctagcttccttggcgcgagcttcctctctatccctctccctacccatcctctgtacctccttggccgtcctcgccaattcttccctgacctcatccacttgggcagagacggcctttttctcctcttcgaggttttgcatctcgacgatctggttatcgaggatcgtctcagcctgttccgtagtgattcgctgagggtgcacagaaaaggtgatcgacgagccgagatgggtcagtacgaactgcggtgaatggtagtaccccagtctggaccaagaggtcggaaagcgaggatcactcacgtcttccaaagggtatttgctacgcagtcgagccaactcgagctctagttcccggatatccttgtccaagtcggcgacctctttggtctccttgaccatctcggcataagctgaacatgacgagcggacgatcagtcccgttcgtttaccgcttctcacatgcatgggaaaagtgggggcaggtcacgatatccattgcatgacgtacaggtggaaacgtctcgaccgaggacttcgttctctttagtcaggttctccaagtcggccttgaaccgcttcaactcggcctttttctccgtattggtggattctgcaaagtagagcaagggttcgtccacgattcgacagaaagggcaaagaaaacatgaatgctcaccccgttcatcattctcaccgcgctcgagtagacgaggcgtctcgctcgtgatcgattgggtgaattcgagcttggcttcttgttcgaggtatttgaactttaatttacggaaaaagtcctatgtaaccaaacatgatccagtgtgagcatgcgcagtagggattccgaaatgagactcaaggaagaggaagatggaaatcgagagtactacataccttttgggcgttgacttcccattgaactttgatagggttcgtagcgtccgtcatccccccgctcgtccccacagtagagtcctttagagtagcgtccaggaacttggtcttgatagcctggatatgaaaaggtctggatttcatctcggcgatcatcctatccgggatgattttagcgtggtggatttgatcagcttcagagtcgtgtcaactgagaatggcgatgatacctggttgatagactcacttggcaatgtcttccttggtgaacggctcttccgatccggtttcggattgaaccgggtttgctacttgggccatgttgacgtcgatttcttgatcgtgttatcaggtcagcttgggtgtttctcgagtgactgtcgagatgattgcgagttcaaagatacaaggaccaagttgtgcaagtagttggtgttcattcagggtttgtttaccaagtcgaggacaacaacaaaatcacgtgactaggctactctaggccacagtgcattcgttagtcggttgatcgagtttccactcttcatttcccatcacgtcacaacaaaacaacgaaccatcaaccatatcatccagctgcaagctacatctcacactcttcccgatcatatacaatcccaccccaactagcaactagcaactagggtgacgaccctctgtattcgtcttcgtcttcggacctcttgcaagccatgacaaccacctcgatcgcggtacacgtccgtatccgaccgcacaaaccatcagatggcaacatcacccccgaggacgtcctcctcacccaacgcacggcctcggtacccagcgggagcaagaacgacccgacccaacgcttgaaattcgaattggacgcttgccatggaccacagagtactcaggaagaggtctttgaaaaggtcaagccgatgtgagtctccgtagagagggagggtcatccagttgcgagggaacgaggttgaacgggttccctgatggatgacgtagtatggaacaggtgtacagaggtatcgtgagtgggatcgccatgttcgacagatacaacacatatatactaacttctcatctcgttgtgaattcgtagaacaccaccgtcttcgcatacggagtcaccggtagcggcaagagctggaccatgcaaggctccccaaaagaccctggcgtcattcctcgagtcgtcaaggtcagtttcagtcccagtggacctgcccctttgctctcgatagacacccccgacgtccagctgaaacgaaaaccgacgtttcctcggttataatcatagcacatctttatgaaaaagtctaggctgaaaaaatcgagcttgaagatttcgttttcttacgtcgagatcctggtggaagaggtttatgacttgttggtcacccgacgactgggagaggtgagtccatggtcttgatcatcgaggtcatccatcactctaggctcgacgcgtgtctagaacagggcattcgagctgacttccctccctcctctgggtgtatgatagacgatgaagaagctagacatccggaccacctcgacgggtgaaaacgtcatcgccgacctcaccctccaagaggtatcatccgtacaagagttcgagaccctctacgcccaagcgagcgcgtcgagaaagacggcggccacgaatctgaatagcagttcgagcaggagtcatgcgatcttgacgctgagggtggagacgaccgagctggcagagaacaagagtgagcaagaggcgggcgtcggatatatcggattgggggtggatggctgatcacgtcggtggtacccgcggatgatagcctatgtgggcaagatctgtctcgtcgatctggccgggtcagaggataacaatttgacaggaaacgatccgcagcggatgcgagaggtgagtcggtcgagtcaggggtcggagaaatctttcgatcttagtgacccaatccgaaactgacaaagactgtgtgactagtcgtcggcgatcaatcgatcgttgacaactttaggcaacgtcgtcgaggcgctgaataacgggaacgggaggatcccttatcgtgattccaagctcactcggatcttgcaaggtgagtcgtcttctgccggacagattgcaagagtctggtgctcacacatcgtgatgtctcggtacggcggattgcactcatagatgcactggggggaagctcggtgggcatgctgatctgcaacttggctccaggggacaagtacgccaaggatacgctgaggaccttgaagtacgtaacagcgctggaggacgtcgatcttgacacatcaactgatgaggcacaacaggtttgctacccggacaagagagatcgagaacaagccagtcgtcaatgagcgcgatgaccgggtcctaccccgaccgcacttttcggcaccgtctagaccgacgatgaagacgtccatggcgccctccgtacgaccgggcagcagcaagtctgttccaggcaatgctgtcgccggaccaagccgacaaccgttgagaccgttggtcgcaccgcctcagcatgccaacctgggcgaacaagtccgcagagaggcgcgtgaaggcgggattaccttgaccgaggagcagttgaacgaccggattcaagcgatcgtcaagcaggtcatgcatgagcagtccaaggcagagtcgaaaccggtggatctggccgtgtcgccaccaacagaaaccgcgccggagccgatcaaggagatttcagctcgagcgaccactgcgacgacggtcgatttgaacagtttgacggatgatgaaatccggtcgagggccaaggtgttgacaaacttggccaggcaacatcacgacaagtgagtctcgcctcgatcacgggaagtcgagcatggcagtcgcttatactgtgtggcgtattataggcacgagctggagttggccatcaaatattacaaggaagccaaggtgagcaacggtcccggaacgtcggggatcttctggcgctaacggcagaatgcctactcaggtgtatatgccaacaaacgatcggctcaatcgacggtgagtaccccaaacacctgatggacctagcaaccctatcgtactgacgcggcgggaacctttaggataacggaactcgagctggctcttctgggtcagatgccgattcccggtcgagaaggcgtcaaaacggctgccgatcctccttcacctggacaaaagcggaagcgagctgatgaaccgaccttgccgtcatccgagacggctcctgatactgaactggaaaagaaaccgaaattgaaacgttcgaaggccaagatctcgttgtccgaattgacagaagagaccaggcttgaggtcgccgctgttgtaaaaaagacgcaggtcctgggtaaccgagcgaatgacaacgcgaacaaggaggtcaagcccttggccctaagctcgaacgataaaaacaagccgtctatcaagtcggcgaaacccgagagcaaggtcggactgggagtcttgacggacaagctgaaacccaaggtcgatctcggccggacgatctacaatgaagacaaggagaatggcggaccggctccagcgaaacgcacacggcaggtcagaaaagtcgttccggtcttgctggacgacagttatcagcagagcgacgacggagaagatagcgacgaggtatgtctcgttgtccttgttggtcgtcggactttccccgcagtgtgggtcactgactttcccggcgtctcgatagtacatgccagaggtggctaaacgacccaaacgaaagatcggggttcgagcttgaaatcacgtcaacgactaagggagtctagatcttgtattgttcgcctgcatggcgatcttttctacgggtgtttgctactatcgatacattataccgggaatcttcatccggtgtgctcggttttcattttcccacaactccaggtaaagccagagtaaggcgaatctcggttcgaagaaggggatactgatgggcggatcaccgtcgttcgcccgtcctcggctcgatcggtcgaagaggcatgagcgcagcggccatggtcctaccctcctcggcgagcaaattgaacgtcgagcaagcgtttcgctgagcgagtcgtatgggttcgatccaaattcgtcatgtcagatcggtttcgacgggaaagaaaagggagacggtcgaaatgaggctcacggaatccatgatgtccagttgtatacccagagacgagatgtatgatcgaagttctggtggagggggtaaaacggtggatcctgttcctagcagaaggatctctgatcgatcaaatcgggatttcaagatattcatcagtccgatattcgtgaccaacgaagcagcgatcgcgacgacgcacccggtcgaggcaagacggtctcgaatatcttgaacctctcgaccgtccattccctccacacacccctcccggtatccctctcgaccttgacggggtccacgtcccacaagaacgcgcgatcgtccacaaagatgaccccgcccgggatgatcagcccgtcagagaggtggaacccttggttgttgagcttggcgacttgtagtcgaggacgagcggggtcagacatgttttcggcgtcaaagaggttggtgagaccgcccgagccggcttgggtcggtcgagccgggtggaatgagcgggcatggggaagggcgaggtgggcagcgagggtaggttgaggtcgagctgagcggaggagtcggggtgtgaacgacatggtgggaattgggtgagaaaacttctatgactcgattcgactcgactataacaagtttcccggtgttggctggaatcgaaggccaagaggatgtcgacagagtagtatcaggattggatagtctacgttgttgaggtgatcgaactttgtgatcacatgggtccagtcaggggcgcggttgtcgggggcgaccgagcgaggccgatgctccgataaagtcggtaattcacctccatgcccatacctatatattcctccatccgactagactcccaaaccattcccttgtatccaatctcttcgtcacacagattagatctcgtaactcataatccttatacctcgacgatacatcactacaatgcccgtcgctgtacctaccacgaacgagcaaccttccgggatggaatacctccaagtagccgacttggacgtctatcgtgacccgtccagctcggaagaggccaaattggccgaatgcaagaaggtgagacattcagagtagcctgcagtgctaggtgattgtgtgggtgctgatcgatgtgctcgcggtgtaccaggccgcagagagcttgatcgtaagtcgggttatactcaactccaccggctctccgcgctgtggtcctaatcaacctggattcccgtcatggcaatagctgaccggagcgctgatcgtccgtgattctcgggctacggaacaagccaacgagacttacctggatatgctcgaggagtactttgcccaacccgccgagaggctggcggaagaccttaggcccgagctgggatatcaagtcgtaagtgtcccgtacaggctagtttagggtggttggtcgatgcctcgtgcgcgcgccaaggtcgaaagggcgcgaatcatctcgctcgcagttcctcaaaccaaaaacctcctggtcatccgcaggcaagtctggcctgaacgctgaccccacgacgtacgacttgcagggagctaccttggaggacacggagaaaccttcctgtaaatcagtgaccaaatgcaccgacatcatcgccgccctccccgaagcagagcgtccgatcgatatcaccggtgccgatcccaaatgccgcttcttctggaaaatgtccgataagcggaccaccgaggcggaagctgagaaagccaaggtggacggaggggaaggattcaagttgcatgatgcgcccaacgtcgttcccaaggctttcgagggggtctgggaggacaagatggaggattgggggatgaagatgaagacggcgtgagtcgggtcgggcgcgggacgttcccgtctgatgagtgagtggggtcactgacataatgcgggagttgttagcgtccaaggagtcggggagatgttgtccgtcggtttgggcatggagaagaacacggtcaacgatgccggtcgatacgggtgagccgctttgtagagcgccgcaattgactacggaaattgaaggacgagggattgcttgtagatctcacttgttggcacctaccgcgaccgacctgcggaagtacggcaaggagggcgagtaagtcatactcacgaaatcgatcaaccgaggtcgatcactggtcgctgatcgcgcgagctttcaacgtgaaacaggattttcgctgggtgagtcgggaagcgcggaaaggatcctcggtcaagcatactgaggccgatctcgattggttattagattccactccgatttgaacttcttgaccatccacgggaggtctagggtgagtctccggcaggatttcggatagtcattcgggctcgaactgatagctctccccgatcagtaccccggtcttcacatctgggctcgaaacagcggcaagaagatcgccgtcaaggttcctcctggttgcctcttggtccaagctgggaaacagttggaggcgttctcgggtggactggtcaaaggtaggtgttgaacagcaggtcatccctggtcaacctcgatcagaatactgattcgtggtgatcaatcgcagctggataccacgaggttgtatgcacggctgccaccgtcaaggtaagcagcactcgaagccgattcgtttcgcccgcgcgctaagattcctttgcggcgtggacaggcgattgagaacatcaaggctaacaagcccgacaggccattgattaggatttcttccaccttcgtaggtcgttggcgaccaactcgttgacatactgcccagccgactgacgacatgagccatttagttctaccacctttcacccgaatacgagctgcacggtctgccagaattggtcaaggaggccgagaaacgtttcggacctcaggacgactatggtcgaatgaccgtagccgagcaggttcagcgagaattgggcatgatcgctttgtacaaggaataggcggacgccttttgacaactgactgtctatggttgtatattatctacctatagcgatactgagcttgaattgtgcacaaatgcttcacaagaaatatcgttcgagctgaagtcagttccaccttgatttcgatgaccttcttgttgaccatgggtacgagcctggttctggacatcacctccattgtgacggcctcatccagtttcgcaagatcctgggcaccagtttgatacccattgtattgcaacagctcgatccatttctgtaaaagtttgttcatcctttcgctatctcccattcccgcaattagagaacggaatatgaccaagtcctcctggccataacgagtggccaaaatgtgtctgcttcctatcaggaagcgttgaaattcaagaggcctcatcttaatcggggcttgtgaaacgcgagcggcgagcggtgacgttggcaccttcctatatacgtacaagagattcctcacgatgacagctaggttccttgatgggaacttacccggctatttatgtatgctgatcggtttatctctcaatttgaatgaggaaggtgaaaccccgcttgaaaggaagggtaagttgtcgttgacgacatgatctcattggctattaatcgattaacggacgtgatttcgctcgtgctccgcactcattcgcaagctaggcaacgaatcccatcaacatgaaaaatatacatcggaccgggtacaaccacgagagtactggtttacagtaagacataagataaaaaatacacaccgactgaatgaacgtgcggtgacccctacgtgataaaaacctttcgcagccgaccaaatgagcattgttcgcctgtacgagggcatgtcacaaagactccattattgtctttggccattgctcgaagagcctggagtttagggtcaattgtcagtgcatgcggtctccttcaagcgccgatggagctcacgttgtaagaatagacatatccgttagggaaagtcatagggtaattcgtgtcgtccatgacctcgccgctgatccggcagacgagcgtggaattgacatgatgagagaacgggacttccctcgccaagatactgaggtctttggcacatgtgggacagtcgatattgcgttgaggatgttcagggtggtcatgtagcggtgtaggatccgtcatcatcggtagcgctgggtcgatcgtaatgtcctccatgacgtgaacaggtggagccgcggccaaggatgggatggagaggaccatggcggtattgggatcctgaggtgcgatctcggaaggctgagacggtgtcgaatgtggagcggtaggcaaacaagctgatagcttaagcgtcgacaatccggccgagacggcgagtgacagtagcggtagcgatgtgattccgtagacgctgtagaatgtctccttgaattggctgcgcagactttcccatctttcctcactgtacatggcctgcgaacgacatcgggtcaatacgttggttgctccgccataagcgagactgccaaatctacctggtacatagagaccgtcgtccagcttggaaaagccaacagtcccatcatccccgtgatctccttgaaatgcgtatctgcccattgggatgccagatacttcctcgcatacgccaaggcctcgtttcgtttccctgcacgacagagctcgacgtattcttgtcttcgcaagtggaactccaggtcgttctgcatataaatcgttaaccgtaagatgggactccgatacacacatccattacgccttcgactcacctttgtcttcttcagagttcctcggttctctccgcaccaagccagagcctcgccacagctcttcttctccaccaaggcggactcgaccctagcgcactccacaaatagtgggatatccacatacgcctacgataccgcctcatatcagcttcgcatctcaatcatggtcagagaaggagatggagacgctgagactcacttcgatcccttgttcctgagcccaggctgtggcggtgtctcgttttcccgttcggagcaggtacacggtgataagtcgatcgagcctggtctccgtgaacctggaagcaaaggcaataccgatcagtcggcaatgaccaaataggatttaaagggggatcatgcgacacgcacctgcgataatcgggttgatcatcaaagaccggagtcgactcgaggtcttgcatgtcctttaggatttgaagccgggatttcaaattcgacgacgagctagcgagggatgaggaagatgcggaaggttggagttgttccaactatccacagtgatcaagagaaaatcattagctggagatgtctagatcaggttggtaaacccgattgggcgcaccttgcgtttgaggcctgtgatacggtcctttgcagcctggatagagttcaagacttcttctcccgtttgtttgtctttcgacctgaggatcgtcttgagtgccgtctgttcgtcgagtcaggcagtacagtctgcgtctagctgcttgtagcgagactggcggatcgtgtcgacgggggcttacctggactcccgtaaagtctcgctctacctgtcgctgcgcggctcggtggttccgcctcatcagctcgtacggaatctacattccgaccatactgtgagcaatctaccaagtcgaaatgtcactacgtctgttgtcgatgacactcaccctgatggtaggctcctccagcatctcggccgaggccttgtcgaacttgcgttcaatcagggtcgcgtgcattttgcctggcgactccgattggtttcactcttctggttgagggtgttctatcaattattgctacgctggctaatgttcagaagttctgaacaggaaatctttgctgtcgggatgcttggctatctacgatttatcaggacgttgggtcgctgagatctctagctgatattaggtgatcgaccttgaatcgtcatctcgttcatcggatattcccggtcaagcctttgtcgatttcgacttctttatccgcggtgcaagaagacagctccaacctaaatgactccgctacgtacacgcttcaactctcctttcaatcaagcagatcagtggctttttggttggcagtaagcaggccatggcatttggcatttggcataaatcgctggtacatacagaacgtatcgtaccggccagccgcttcttctaaatcgtttatctggatcctgatgttactgtctagagctacgaaactagcgcaactttgtatggcagaaagctcaaacgcctcgattccctctgattggtcgggatatctcaaggtcgcagtcccatccgctctctacacggaaccctgtgacccagtctttccgagaaatttggtgctggatttcgttgagaggttcaagacatcgcctagccttggattttctcctggtggactcgcattgctcggagcggccgtgagcagaattcatcattccaaccgaatcccccaaaatgtcgatgaagacctcgacggagacccggggctagtggtagtcgatagactcttcccgtatctgaagagaactgtcttccagggccgtctttattacaggatccagctcgttgtcagacgcaatctagaagatgccgcccacgtgacgttcgaatttgagcagcaaagacgactagcggaatacacttggacctgctggctatcgctcggcggtgaacgaatacctctttttcgggtcggcgaagtatgggatacaataacggaatgccaagggattcttccaatgtttcagggacaggtatcaacgctctatgacgaggcagattctctgcgcaccagagtcagtgagatcagatctttattcgaacaaacacaaaatgcgttcatcagctatgtgagcgaggctcgctcagggacgagtcaaggcgatgagattgcgacccttacaaatggagcatctcatcctcgtcgaagacaagaaagagatgaagatcacactagcagtgtttcaccaagcgatgatgatatcccggcggcagcgcgacagcaagaattcgtgattgagccaagcgtttcgtaatacagagcatatttggcgagggagatgctgccctcatctgtccaaaggtaggactgaccgtcattgggagagccgaagtgttcactccgtcctttcgttccgagccatatgccaataagcggtgtgtccatgatcaaacaacacttagttcagccactacaagcgtgaggagctcgacagccggcttaagggaggagagcagaggaggagaagattggaccggtcttgtcagatccgcaatcaacaagctgttgcttgtatatttggatatgccaaaatttctaatgcaaaagcaacgtcggattatcccttatctggtctcattttatcacataagcaagctttatcgaaaaccgatacaaccttgccacccgcgtatctttcgctgttcgctacgagaagctaattcgaacttatacatatgttccagctttaaaccttgatgcacgaatacacccacagccatcaaaagtggcagcagacgtcatactcttgtcactcttgggacaagtgcccccagcccgattacgaaatccgctggacatgttggtcatgtcggctcattggtcgctgcgatggagtatagtataatgagaactgccaatgaggcggacaactcctgctcgaccgtacgctgatggtccaggcagttcttagccgcaaggtttgcggctgcgcaatcagtcgggccgtgtcactcccatttttcaactcctccatacgtatctctaagttttggttggccaaatgcgaatggtagctacgatacagtcagccaacgataatccagttagaacagcccgccttttctcttcaggtgactccttaccgtcaggaatggcttgcggctcccgattgaggtagcgatctcgaaccgtttttcgtgcgtgactcgtagccccaaaccttgtattattgttctacacccagatcatcatgagggagataaatgcgatagcaagcattctgtttcatggctgtcggtaagtcggtaagtccgaatagcatcactccgttcatcgtcggggaggccccgtcaagtgcgtgatacagattgagaagttgccgtgtaggcaggaacaccttttgcgagcaaggaataatgccgatggattcctcgtaggcgaggcgatgatcatcgcaacataccaaggttacaaggatcgataaccgggtccaaagggagggagggggtggggatgggctttgtctgcttcgtatgacaactggccccctgcagtcggaagaaaccggaacacgcctagctcaggtgatcgcgcgtttcggcatgaaacgcttggtttgcccctcgataatgatgcaaggtccagtggtgattttggtcgttcgaaactatggtggatggttataagactgatgaccttctttgggaatgtagctagtcccgtttcatcgtggccgaagcagattcagtgcacctcgttggacggatgtctcactattctgattaaaaaacctcggcgcactctttcttctccacctcacgtatgttgtacggttaccctgagacgaaccgaggaggagggaccctcaacccctcgtaatgtgtttcactgtcctcctcctttgtcttcagcaggcatgacattcgccatttgacatggacggccgtagagtaaagtctccctatttaagctggagctgggtaaattttggtttaggggtatcgtcagcttgatagatactgccttatcgtacttcttttcagaccaggaaacgaccaggaaacaaccaggaaacaacaaccgagctaaggatgtcaaacgcaccgtcgcccgcaccatccatcgacagcgttgatcagatgatcgcagatggcctgaatattacgaagatatacaccattcctcctgacatcgagatcatcatgtcgttccaggaaggacctggaatcgcagatgcaagctgtggcgacttgttcgaacgtttgccagcggctggagatccacccttaggccgtttagtggaactcgcaaggagcgcaaaggagtgtgtcgacatgggggaggcctgggattctgcactgaagcaagccaatgatactctggcgcaagttcccgtaggactaggtaaaggtttccctctctacaagtccttcctcaaaaaggaacagttcgaaatactatgttcagacgccgagacccaaccacaagaagtcgccgtcatattccgtcgcaccttgtgcaggcagagagggccttcaaccaccgttctcgaagcgttatggacaatcaagctctcgggtcaagcagaagacctgactgtgccgcaaagagatgacaattccaacttttctggacagtcggatattgactcttcggcgaggttgacagatgcagcagacacgactcagcgtacggtgagcgtggcatttcataagaggaggagaccatccggagggcaagaagaggacggtaccttgccaaagaagccctgcggagcgtcttcgagcgtctgtactgcgcctttgtcgttgggaacgtacgaggactcggcaatatctgtacaaacggagatggcacccggtagtgatggaaggtaaatctagcagcgagtgaaaccaatctaatcgcattcagaataagcttgagatggccgaaaacccaaccccgtcaagaaaccttgtaaaagcaatccatgatttatgcgacctgtccgatccactgatatttggacattgagacagcccccgcgcttttgatagatccagaagtttatgagggatgtcattgcgcctgcctatgtacgcacgcaagtacattacaccacttgccaagacatgtgtttttgaataacaataccatgtaatcgaatacaaatacatcgaatgaccatatctgtgtcttgatcgatttcgaaagatctctttgtattttggtcttcccgtctggaatcaacctaaacccgtgtaacacatctccgaggtttgaaatactccaattacctgccccccgattttctagaataaatgtcaagctaatcgaattctcacgctggcatcaaccctttgtctcgcggcatatggtggaatagccactcttcattcaattcggggcgtcgtccaccgcaacaaccgaagcgatagatggcgtgataaactgcgtgactctttccatcgaatcctcctttgttctgaatcgtgattagcttcttggactttcagccaagatcaatatataaaacggacgatgaggatgagtatgcttgttgggatcctggtagcaagatcttcaccttcgtatcatcacagatttctcgtttaaaatgtctatcccaggaaaatctcgcagaaatattgaaatcgaccatggcggtaagacgctacagggttacaaagacacgtacacttatggtgacgaacattatccaaaaatccttcttaaatttctggaggaaggtccggacctaatggtgaaactgaaggatgttgccctggatgtcgtatcccaaatcgacaaaagcccaaagaagagtcaaacccactccgatcttgcacacatgtttgcgaaacaagccgacaagctcttctcctcgacggccaccgacattcttcctactgaacttcgaggaacccacgaagtgacacacagcgcgagcgtcgacaaaccttcacttcgcccgccttcgaagcggttaggaagatcaaaagcaacggagacatggtagtcatggttgtctggggtatccccttggaccagatactccacattggggcttccaattcagtccaatcccttgcgaacgaattggctgatattgggtctgagatgactcaaaatcgtcacgacagaaatgaactatcatcccaaataagtgccctatcgtctcaggtgaacgtgacagatcaaaggtatctcgagcttacggagcgagcactggaacttacgaagctagctcagacattggggacaagtctcgaagggtcgtacgccaactctggcatgacagacgctaatgcagatacttctaatctcgtcgttcgctctgtcgatccaaaatagtgtctcgcctatccttctcgctcttcagcatgatgtaacatggaccgcaaatatagatatcgttcgacgtgaagcaaactcatgaataacaccatgtctgcatcgcgccgaaactctgcgcagactgatcatggcgaatatcagtcctaggattgagtttttgaccaaagatctttcacgtcgatgaatgcaaaatgttccttgttagaagggatccatctggtgagcttgaccgatgaccgcgcaactcctgctcgtctgtcagccgaccatcgaggagcaagagtcgcttggttcacgttaagctatgcttctcaatcaagacgccacctgacataggattgatctacgatgagatggcttgaagtcacgagtcgtgacacgcctctcctctgtctgatttgggaaaagaaatggttctcgatatcgcacactgataggcatgaccgggtactgcccatcctcatccatgtctctgaagcttttcgtgattttttgggcgtggaactcgagcacgatgcccttctccagctgggctcgttggatcaagtccttgaatgtgcccggattgcagatcggcagaaggtgactaggtcgccagaaagttcagccatgttagcaagcggactgaatatcgagaaggactgatctacatgttcatcggtgcttcagaaccgccagatgcttcggcgctctcatgaacaatttgcatgagacaggcaatcttcgagttgacttggaacttatataacatcactgtaatagatcttgctgatcagcctgctcggatcagagaacctatctgtaggatttcgatcggctctgaccgatagccaagcgatgatgggggcggaccggtcattagtgaaaggaaacgccgagtatacagtcgttctcgttcacaaaaggaaaggagattctggaaggctgctgctgaccccgcgtgccccaagaagtcggtgatgcatgcaagtgtcgcagcgagtcctatccataagctctcatggctgtgctcctttcgaatctgagccctgattgtcaacaagacgaaggacccgtgacctgttgttgcggggtgagaggtatcgaccatctacaatgactgatcgggctgtgtatcggcgttcaatatcgttcagagcagtagaaagctgggattgctgtgtcaccccttccgtccagctcttcaggttgcgcaaacgtcgccttgttgttaccctgaaactcggtcaaccgccttgagacgcgtcggacgcgtcatgttggaatcgtggctactgtcgggaaagcggtgaaaccgtttcaacttcacgagaatgatagacgtgatgcctttgaggtcacactcgacatgccctagattagactttctggctcttggttgtgacgaggtgcttagtcgaaccgtttctaatctgctcgcagccatgaccatgcaagcgctagtgacgggccggatgcggggtgactgctcagcgatgacgtagcgtggggggcggcagtgcaagagggaagaaatggaatcatttgcatccgccgcagtcgaaagactcgagcttcttctagcttcctgggcaacccggaacaccaccaccatcacctcccaggcctccaatgcaagcatcctctctttcgggaaatatatacctcacattccagtcgacacagctcgagccattccaacctgttcgttcaccaaaattacaagtcaattccagagctacctcgtatacccactcaatccctccaccactacataaactaactcacgcacaaaatggtcgccatcaaatccatcgttttccccaccgccgtcgtcgccatgatggccagctcggtcatcgccgagcctttcaacaagatcggtcgtgccgaggtcgaggaacgtcagttcttgtcttccttggtcaacggtgctaccagcgtctttggagatgctaccgtgagtcccgcatcgagtggcatgagtttagctttgaatcgatgattgactatcggtccccgtggtcatctagtctgccatcgagtcggttgctactggagtcgcctcgactgtcactagcggagctggaggtgtcatcaacaccgtcacttctggagccggtagcgtctttggcgctggtactgtgagtcccgaaatcgttccgatccgacatccaatctgacgctcacctctgtcgctatcgaaaaaaagtccgccgtcgagtcggtcgccactggagtcgcttccaccgtcactagcggagctggaggcgtcatcagcaccgtcacctcgggggctgctggtgccgcttcgaccgtcacctcgggagccggcggtgtcgccagctcggtcacctcgggggctgccggtgtaggcaacactgtcacttccggcgccggtggtgccgtcaactctgccacctctgcagtcggctccgcgtgagtcttccgaccgcgtacaatgtcgtgagagaaatcatgagagactgatcaaagaaacgctcgcttctcggtttgctcgatatagcgttcccggaaaccccgcgctcggtcaatccgacctcctctccaagggtctggccgccggactctccctcctcgccatcggtgccggagccggagccttgttgctctaaggcacacgtgctcatcagtcctaaaatatagctcgtgatcgccctctaatcagagagcgggacgcggagacacacggacgatccgcttggagtcacccatggacagatcagctagagacaaagagagaaagatattcaacgagactgtttttacgccatctttatgtagcccaatccacaagaactatatcgaatcgaatttcatcagcctaaattgaaacccgggccgtcacgtatatcgtttcacgcagtgccacatgggttcaatactaggctgggctgtaatgccgggtaccgtagcttcatagggattatgagatcatccccgagttctcagaagctctccctgtcaagccttggtttgctatattgtgcccttgaagctccgaggctaatcacacgacaaattctagtacggcaaagcacggcctttaccatatgatctaccgggtctctgtagaatcgaagaagaaggagagctcgaccctcgccgtaagggtgacaagcgtttcaagacaccggttgccaactcaggcggaaccaaagattgatgtgaaacgggtcaaataggaggaagagaaaccggagaaagggaaatgaagagttgacatcactggtctgaccggtaaaccatatctcggtgacgctcttctcagtgaccaagcttggctggcaaggtctcgtatagcccgtcatcgttccggccctaagctgaggtcgtcaccgttggggctttggcaagtaaccttctttacttctatcgcgtggacgcgcttcgactctttgaaaccacagagctctgacatcgaacagggaacgaggcatggtaatgctgatcgacagagcggcaagatcttatggatcatcaaccatgtataaggtttcaaacgccattatatgatccgggtgtgggcaatcgagtcgggaaaccccgcgccatatgcactagtagtgcgaatacaacctggtgatagtgactgattcgcagcggtcttggaaagggtccaagcgggacaagtccatgagaggggactggagcacgaaggggcgggtcgctcacagtgctatcgcaactgcagtcatcacgctcaagatcatacccagcgccaacgagattgggcccgcaccggttctccctacggccccgctcgtcgccgcgctggccatctggacgttcaagaaaccggccccgcatcgatcggtgatcaagagcaggacgtcggcgatcgtgtccgtgaaacttggaccataggcagatttggagatttccgggctgggtttgaccgcaggggacgaggcgtataggtcgagcagcgattttgagcaggaagaacaggtcggttgggcggtcgaggggagactgcagagaaaaggtgggtgtcagcgcgcctgttgaagaaatcggctgggcgtcacgctcacgtattgccgccagggatcgaccagagatacgcatcgtccggacgatcagccgacatggcctcaaggtaacaatacgctccggttgcttcgtcctgtagacaagccgcacgttgcatcatatcgtagtattgaaggcctggcgacgtgcgtgttgtcagcaacgactcctttgaacacatgcaatcagggctcacctcggtagacggacaaggcgaccgtgttcccctgctgcaactcttgtcgacaattcccggccttgatcatatccttgtacgatcgctggaagaacgccgaacactcgtctgcctgtgcggtcgaggccgggtgacagatctgagagagcgccggattcagttcgtccggcgagcggagcctgtaaagtcgagcgacgaggcgagatcagtaccggctcgcgtgcatgacgcatcttagcttcaagcccgagcttacatgtcggcccagccagaactcgacccgtgtaatagcccgaacggcttgcacaatccttcttcgttgcgatccttgccggccatctcgtccgaggtgagaaactcggtcaggaaagccacacagctgttccccagcgagtaggagagggtcgaatcgagtggaagggggaaagaggtgttgagcgggagggccgaggtgggtgccgggggaagggggtcggagacatagttggtcgtcgtcgaattgtactctgtcgttgtattggccgccggagtagcctgttgaccctgaccggtgttaccgtcaccatcctggcctgccattcctcgacccacccgcctgcccctacttttccctagcccggcgatatcctgctcgtcccccgctcgtctcctgcgcgtcttgcccgatgcccatcgatcggctcgagtcgggtcatgtgaggtcggtctattgttgtcgttgccggcggtggtagcgcttgacagtctaccaacagacgcatgtgtagatccagtaggactacgggtgaagcatttccgaagtacggaaaaccaggaagaagaccgctcgatcgactcggtcgaccctttcgaacttcccgacgaggctgaatcggagatgacatcgtcctcgctcggctcagatatctttcctgctcccaactcgtgttcgtctgcagagttccgacgtcgatcgataaggttcagcccgtccgacccatctccgaaccttacggtcgtcctggcagtccgttcagagatcagggtcgtcgatgggccaatatccacttccagccccaagcctagtccatgtagtccaggtggagcttcctctcgcttcgcccgagtcgagtctgttgccaggtttaaagccggatgcgatgtgtacgaagaggtagacaagtcgagatcgttcgtacctgacccggctgatgaagaggaccgttgccaaaccgattgtgatcgagatcgcgatgccgactcataccccgggccagaccaagtgggaatatcatcctgcgtccctgttaacggcgagcgggctgccgaggacaggaacgaaggggacggtgatgggatgggggaagggagtggtgatccggccgggcttgcaaagacccccgtcgaaggggacaagagggagagcgtgatcagggtcgtacagaccgtcaacgagagcgaaggggtctgtctggtgagcgaggtagtaccgctggcgatgctctgatgacgacgttgggagatggacattgtcggtagatgaggatggatgaccgggtggtccgatgatggtccttttgcggggaatggtggataggtctaggcagacatccgtcgggggtcctttggtcgtagttcgaaaaaggttgaagatagttgcgatgaattcaagaatattctacgatggagtcgatagtatcctgtcgtggtcgatgggaaaggtctgatcaagaagaaaaatcgtggaataggtcgttgttgatcgtccagagttcgatcgtcgaaaggccgtgcaccgtgtatcgtgctgtgtgtgtaagggaatgtaagattgaatcttgccgtgtggggctgtgtggaactatcgcgtgcgtcggacgagtctgtttgtgagggttgtagaggtggtcgatggaagtcttgatgatgatatgatgatcacaaacaggtcgatgcgagttgcaagttgatgatgaacggaatcaattgagaagaatcgtttctgattccgctattgttcggaagtattattcctttccccctcttcctgctgcctccattttcaaacgcccttgcaacacgcgaaatcgcttttcgattgattcgcgcttgtaattcatcgttgtgtcgacaaagccgagtcgcgttcaatatttgctgagaccagtaggagacgcccgcaccgatttctctagccattccgtgcctaaagtactgtccatagatcctctcgagggaggatcgtggtgcgcggccgggtaaagaaggcgtttcagcgtgaaaaaatggacatactgggaatcgaacccaggtcacttcaaaaatcgaactgatagtgcgaatgaagtctcgtaccactggaacatatccccgtttacgtcatcgattcttacgttacaagttgattttgatgacatctgtcatctgcatcggaatgcagacatgctttgctcgaggaagcactcaccccatatatctgggggtataacctggaaagcctcgtggagatgtcttacgctcaggaagacttggcaaaacttcgaagaattcgggtggaagaccagggatagagtttacgatcttcaagtgcgacgaagtcattcgcctcaagctaacgtcccaagcgaaatgaagcccgctaacgggactgtctgaatcaaacccgacactgtcttgccaaagtggagacgccgaaatattttggaaaccgacctgtaaaaatctgtactatctgagcgctcgtaaaattgtgaatgggaatatctgcgggatcttattttggggcgggattgaatacattcgttgtctactcgtcgcaaacgtcacccgatacagacgcatccgtagacgctcgatctgctgcagttgagtgactcgggcatctcatctgccctgtgtgaaacgactagcatcttcatcctgtcgtgttctttcgacgctatgaaacttcgtcaaaattgtagttttgcgactcacggctgcaatctttacccgttggacgcctcacctcgggggccgtcgaccgaagtggcgttatccccgcgcgggaatcacggcggaattcatcgcagaataattgtcacgaggttcatatcataggtcgacgatgggtctatggtctcggtcaggtgttatcggcaagtaaactctggatctttccgatcgatatgatgctcgtccgatggtagatgaggtccatgttgaaacaagacgagaggatgcgccgtttgagttgagaatatctgtcattctgtaaatgttgtgacgcgtgagccgacggagatacccaggatcgagaccggaaccggcgaattccccgcctgaccgcgtctgattacgaagtcgaagctttcggactggtcgtgtgccgcgcggccgagagagagcatacacaagtcgaagagagactgcgtagacaccgttcgggttataggagggggtacaaccacttctcctttgatccttctcacttacagtcgtttactgttatcaaaacatcacaagccagctgctgcggatcagctctgtacatctagctcactcgtctaatctaatacatagctcttttgaacaatgtccaaagctgacgagatccccgtcttgtcctttatcctcgagccgctgcgtgagtcgctgatggacgaccttgagattgatcgaacacgtctgacctcgaaacattggctcgtatccgtatccttgttcacggtcttgaacgaccgtacgtgtcagtcgtggtctcgctcttgacggcaggaagccttgtcaactaccggagcggcaactcgcaagccatcgtgcacgctagcaagttgcttacggaccaccgtccttcgagtctacccgtcttcttcaacaaacaattaaggatcccggacaccgagaggttcaggcgaaacatcgcttcgaggttcctggcgtatttcccattcctcatggaggtctggtattggttgttgacgtgagccgcgaaaagtttcgattttttccccgatcgacctccaacctctctaacatcatccacaacatgacaaccaacattgttggacaacgtctgcacagatattggctatatcaagggatgagagctctacagggtaattgcgagagttctgcctcgttacgagtcggtctgacattttgcgtgcagctgttactatgggcaaggacacccgggacatttcgcaacgacatgcgatctggttgctcaacctcgagaaggctacagggctagatatcgaaaagggcttgcagtccctgatccttgataggcctttcatcctatggttcttcaacaagtacgtccggaaattttacatcttgtgcataattgtcccggggggctagcgacttatcgtcatatcacgcgctatctctccaccaggacctacgctatggtccatatcccggcgaccatctcgttcatcggctacggtttttatgcgttcgccccgcccactttccaaaaagtccgacggacattggtcctttgcaacacgatcgcctttgtcatcttcaccgcatggccctgtatgcccccaagattgctgccaaaggaggaatatggatatgtggacacgctgcataccggcaaagcggctagtagtgagtcggagattggcgacaaggcgaaacgcctggaaactgacgggaagactatccggcgatacttctagtctggaccaccaacaagttccaaaatcagctagcggctttcccttcgtaagaccgcgagttttgcgattttaccttttgcgtacgctgatgttgataccggcacaatagattgcatttcggatgtgagtccatcccgacgtcgcggttggagtatagactcttcgctatggcagtataagctgacacattcatccttgcgcaacaccaaaagactcctttgtcatgtaggtaccgatccgcctctacttggcatactttctctctgacgattcggccgccctttcacagcggtctctccttgttcctttactcgccgcacaagcccatccgcatggtcgcgcttgcttaccctgtcttgatcttgactgtcatcatggtgcgtctcggtgtcgcggccaactcctcgaagcactttctgatggctcttccatgtccctctttcgctatactacaggccaccgccaaccactaccttctcgatgctgtcggcgggttctttgtgaccatcctcgcctacaagctgaacacgtacctcctgtggcttcgtcccattgaggagtggggcttctggctatgccgtacggaaaggccgcttgacaaggccatctttgaccaggccttgagggatcatggccacgtgacggccggcgtgtcggatacggacgacgacgtcaacgtgcacttgctggacgaggagagggatggcaggaacaggatgtcggatgaacagtagaagcggccggggttcgcctaggggaacggtcagatggatgcggggcacaagtggcgcatttctatgatgagctgctgcgttgttttacacggaactacgatgtcaggcattcccagttttatatagtcgatcgattcgttatgaatgtcacgtgacccgcgagttgggcacggaaccacctgacgtcaccttagttggaggattcgacgatcgaccggaagatgtctgatatgatcaagaattaacagatgcgccttgcacggcttactgtgtacttcttgctttttagacttgttcactcggtaactgtcgtccagaattcatcgtcattcgagatggcttcgctcctgaatacctttacccgtcgggcgaaacccacgacaatctcgctgtttggcatcttcacctcgcccttcaccctcacccgacccaactcgactttgacgcaggcgagatgttctcgtttcctgctccgacaggctagcgagtttgcgcccagggagtgtcctactcctttggtcttgcttcgagcaaaggggctgccgggcgcggaggaagagaaggaagagtcagtgccacggattctagcggacgagccgatcccgagctcatgctgtgttgccattttcgtgattcactaagttactatgcgtggggtggaatgttctcggaacgtggttacacggctgtcgagatcgacatcgatgcaccggaagagtcggcctctacacgagagtctcttcaggtcatggccaaaggttcgtctagtttcccaaacgaagattccaccctaaccttacgccggctttatatttgcagaactgtcacagcagatccgcctgatgatgattcccttcccacccatcatcgtttcgaccggatcgtcgaccctactctcgcaagctttcatctctgaccacccggcatcggcactcgtcctcatcaacccgccatcgacggcggaagaaactcgtctcctgacccagacccggaccgaggcaaaatcgtcggaggatgccgccgcaggattcgataccgccccggcgtcggccccgagcgggaagggattcgattacgaacctcacttccccatcctctacctgtcgacccagaccgagactccggaacatcgcctgcaggctttcgcagagcgcggggtcggtcgaggtggcaaaggagtgacattcgaggtcttggatgagagtcgagcgcctggtggagagagaggtgaagggacgaggatgcaactcgaaaggtggttggatcggtgtggatactgaggtcccaccgagagcgagtagagaatcggatgtgacatatgtggcatgggagcaaacgaccgtcagcaaatggatgatatggataccccttgttgttatacgaagtacatcaagataaagtatgaatgtcgaatgcgatgcaatatatagttagtgaaatacaacgatgacgatctatattggcaccgggacggccggcacaaagcccagaggagcattaggattcgcacgacgttcagcatcaggtggtccctgacctctagctcgtcgctccgcctgctctcgctcttcacgttgtcgtgcgacacgacctcgccaccacatcaaggttgaaaaaccaatcaccagcagcgcgatcgagattgtctcgagaaggtcaccgtcgcccaacgcatctgacccgccatccggccttgaattccttcgcgccgtccggcctgtctcgaggtaatcgtcgtacgagtcttcgagctcgtcccgctgcctggatcgcgcccaggtgacttcgtccatctcgtcttcgatgctaggctgttcattggctcgtggggatgtagcccctggaagatcgtccccgatcgaaggcttgcgcatcccgaagagtgcgagatgtttctgcttgccacccattaattgagtccaccagcttcgaaggtagagcttgataagcgagagcatgacaggccattcagcttctggatccgtctgagcacaaagatcgtagtagcgcttggcaagatgccagtcctattgacgtttcgagtcagagcttgcagaacacgcagtgttgaaagctgagctatcggacccacctgtgcaacacctaatccgttctcatacatccagcccagattccaaaatgccaccgcactggcctgcgtgtctgctgcgctttgataagacccggccgccttttcgtatcgattttccccatcggagatgccgatgccttggtctggagagcaaaaaatcgttcatgagcaccaggcagtatgaggtgaaattgtgggttcccgactcacagtagctatcaccaaccttgacgagcgagtcgacgttctgctgaccagccgaacgaatccagtgaacgagcgccgacagggcagggtcttgagcaatgttcgccttgtcggccacagacatagtgtgcacagatcttgacaacttgctggactttgagttggatcgactaccgactatgaagcgagatgagtcgggtcagacgagttccaggtcggctgcaagatctgaatcgcgggcgcaccttggtccagcaagaatgccacattgttctgagcgatctcgtaacccatttcgccagcgatccaccacctgatgagtgccgtcgtcctctctccgcgtttccaagctgcgtcagcttcccccatcatgtcgtagtcccagctacctcgttcgaccatgctcttcaggtacgaaacggcgaccccgcaggtgccggtctttttcgctaaagccgggttctcgtgcctagcggccttggcatggatcagaccgaggtggtagaacgcctcgaatggattgccattccccagtgcccacgtatagtgagccatagatttgggctccccttcgacctggttattggaattggctgttgatcaaagccggcgacatcagcatcgcggcaaccctttcgttatgggcggcaacggtagtgactcacctgcgaacttgccgaggtggaccttggcttccgccagatccatctgagcggctgcttggaagtacgctttggctgagccgacgttgacgggcacaccgagcccatccctgtacatgatacccaagaggttatggccttccttctcgccctgtaattccacagggtgtgagtgtcaagcaaattactccgcccctatgataccgaactgagccgacttaccagatccgacgaccgcttggaccacatcctcgccaagacgaaatcctgctcgaccccttctcctctcaaatacatcctgcccagataagcggctgcgatcccagctggttgtctcagtacgtgcgcctcctcgtccgtcaacttgcgcttgttccaactcgcatcgaatccgatgggcaaaccattggtcttggcgtccaacttgggcacttccggcccccagtaagcgtgtgccgcccgggtaaagtagtaagtggcgagcttgaaggactggaccgtctcaccaacggcttcagccccgcttgccacgcctccgggtaccgaataaaccgagccgacgtagtgaattcgaccgaggatgaccgagtattcgtgatggttccgatccgagtggtactaatgagccgcgtccggggtaaggtcgcgtcgtcagaaaatccaagcaccgcaccctagcccatgagagtggacccacctggtaatactgtaaaacgtcgtcaaagttttctcctccagccagactgttggccgccttgatcgccggccttttcgcaagctgacccgtgcttgcgaccgacgcgcccatcccatacaccccgccagccaagtcggacaacctcgtagggttgaggggcaaggctttcccaccaggcggacccgaaatgaaattggcataggctagttgaccgacacacgttgcgaaatcagacagtcagcttcagctcgttttgtgtcgcgtacgtatgcggcattggacttacccttatgcgccacgctctcgtaccagtccaaagcgcgcatacaatcctccttgacgccgatgcccatccagtatctaaacccgagggtcatctcggcctctggcaagccttggatcgccgcgaacgtgtagtaaagcaaggcctgtcgtcattccaaatgcgagttagttgccatgacaaacgggtcgttgcttgggttagctcataggagcgtcccttgactcaccctcgattggtcttgttcaacccctttcaatccagaggcatacaggaatcctagcaagtactggctagccgcatccgacgtgtcttcgctcatgtgctataaccgtgaatcgtgcgtcgaggtatggatcagtgtcacgcttctgccctgctcggtagaacggtcgaccgcaacacaaagccaaagggaggagatcgactcactctgaacgactctgcggcgtcttgcaggtccagagtgccacctctcggaggtaacaatccgatcaaccctcttgcaccccaagcatcccgcctgcaaacatcttccttttcgttctccccttcttgcgaggacacatcgcgacccgatccttcggtagctcgttgtaacaatgttttcaagcggatggccatggcagtctcttccttgggggtgaggtagttctccttgatccccagtcgtttcttttccgaggaagataggtagttggacgagtgtgccgatgatcctgagcctgagcctgacgaagatgatgatgaagatgaagatgatgtcgaggaggacgaggaaaagacatccagagtggtgatgaaatcgagtatggtcgtagggaatcccaagatcttgctcgacaccgatttcacgctcgcgaggtcccaccccttttccccctcgaatcccgttccgtacacaaccgtcatcgtcgtatccgttcagccatccatacgtagattcaacattgaaaaaaaaagagtccaaaccatatccgaagaacatgtcagtacgagaacagaggacgaccaacccgacctcgacgacaagaagagcgtgggtgcgcgcgagagtgtgtgtgtgtgggtgggtgggtgtactgaccgactcccagagtttcaacccgtctacccttcctcgcctttgcatatagagatgatcgtccttgttcaacgccaaccggtctataaggtccagggcttgggtgtatgcttgacatgctacaggatggcaagtggttgggttgggtgcggattcggggttcggtggagatggtggtatgatgggattgacgaggaaagtgaagcggtcgaggtcggtcgattgtcgacgttaacgcagagatttgtagggtagatcgcataagcatgcggtatgccaacaatccgtcgacaaggacaggtgaaagggagtgtcgggtcgggtactgacctgtcaactgatcagttgggacattctgctagatcacatcaggtctcagcccgtttattcgaccagggggaaacgatcgtgctcatactgtccgagtctcaaacatccggacttaccgacacatccagatttaggtccaatttaatcgagtccccaatgcctgacgacgaggaagcttgtgcggcttgtccggcgaggactacgagacataccagcgagccgaggttgagcgtagaggtcgaccggctgtcgcgtctcttccgccgacgacgattcagcagcggtatggtttttggcatcccaagagtcctgagaatatgtcaaggtggtctagtttgagcagagagtgaaaggaagatgagggaggttgacaaagtttattgaccgttgtatagaacaagcatcatggttccacatcatcatcgcgttccaacctcatcctccgagtgacgaatcgtcgcgcgaaatcgaaaagacctcgatacataactggtagtacatgatattcgtccccttttacacacccctctatcaagtcagctcatgtgagaagcggagaagctacagctgcacggcatgtccagtatctatattgtgacaggggtggtcgataaagaggtagtgatcatattatatacaggggtagttgcatcagatcacgtgactacctctcatcatcatcgatcggaagtcgccgaaacctcctcgaaactcgatcgacgtacgcaatcgaacaactttctgcaagaacatcaatcgactgtacacccttccatcgtttcatacccgctcactcaagactcgtcttcgaccccgtacactatcgcataatcatggaccgggagaaagaggcagcgaaaaagaccaaagtcgtcattgtcggtaagcatcgacccatactctcccgagacgagcatcctgaacctgaccgtcgaccctcatgtgatcgctcgttcgttcgttccctcctctctcaggagccggaattggaggagtggctacggcagctcgactctcccatgcggggttcgacgtcgaggtctatgaaaaggcgagtcgggaaggtactttggcaagaagcgtgacgataaagcgtgctgacatgatacaatgatcatggtggtggtgatcacgatgatgccggatatcagaacgatttctcgggaggacgatgtagtctgatacatcatgaaggctaccggttcgatcaggtatgtcaccaccgtccctgatcttaccatatgacatgacatgtcgtatctccatcactaacatcctcatcatcatacccacgcgaattgcagggaccttccctcctcctcctcccttccctcttccgcgacatctataccgacctctcgacaaccctccctgaacacctcgatctgattaaatgtgaacccaattacgtgatacattatcatgatggtgaatctatcgtgctctcgacggatcgggcgaggttacgggccgaggtagagaggttcgaagggccatccggaggcaagggattggaaggttttctcaggtgagcatcgtggtgcagaagaaaagccatccagtgaaagtttgcgggccacccacctgatcgctcatgttgccgctacgcctgatcgtcctcaccgatctacagcgaagcagagacccacgcgaccttgtcacacaccctcgtcctgagcaagaccttcccctccttcctctctctcctccggccttctttcctgatcaacgccatcgcgcttcatcccctggagagtatctggtccaggactagcaggtacttcaagaccgagaggtgagtcccggcggaggcgtcgtcgcccctcttacctttccggatcgtgttcccgatcaccgttctgcgtaatcggacaagactgacatacgatgcatggtcggtcttccttggtcgactaggatgaggcgagcgttcaccttttcgagcatgtacctagggatgagcccgtttgacgctccagggacgtacaggtcagtctcgcctcaccaactcgattggcgttcgacacgtcggtcgggtccgggaatcctccctcgtcacaagcggctgatgtcatcgatacggggtttgatattgttccgtggatcagtttgttacagtggacagagacggtagaagggatttggtacccacgaggagggtttcacaaggtgagtcttggtttcagcgatcgagatcatcctcaaccggttcaatgctaacagacggatccccttgaatcgaatttacaggtcgtcgaatcccttcaatcgatcgccgaatcccacggagccaaattccatttctctcaacccatctcgcacgtcgctaccgatccttccgggcaacgagcgaacgggatctacctcgcccccgactccaccgaggcgagcgcaggtccaggccttaagatcctcgccgatatcgtcatcgtaaacgccgaccttgcttatgcgcacaacaaccttttcctcaaggatggacagagcgaggatcgaaagacgggggaactcaaggaacctcgactggcaaagacgttaaagggcaagaagcacagttgctcgagcattagcttttactgggccatggaccgggtcgtcgacaagctcaaggcgcacaacatctttctggtcagtgggacgcaaccaacgtcggaccagcctaaaaggtgctcgcttgcaacgagactgacttcgtgttgcttttcgcttcatgcaaacaggcggaagaatacgaagaatcgtttgatgacattttcaaaaagagtgacatgccgcgtgagccttcgttttacgtcaacgtgccatcaagaatgtaagcccaattcccggcgtcccatcaaacgaggcggctcggagttcatgtcttgatccctctcggtgtttcgcagcgacaaatctgctgctcccgaaggcaaggacgccatcgtcgtgctcgtccccatcggctccctcttggtcgaggaacaccgtacggaggaagactggaccgggttagtcgccaaggccaagaagcaggtcattgagatcatggagggcagattggggatcaccgggatggccgatatgatcgtctgggaagaggtgaacacgccagtgtcatgtgagtcgctttcgtggtcgtaagttcggtctcggcagctgtgcgggctgatacgggaagcctgtttattcacagggagggacaaattcaatctgacgcacgggtccatcttgggaatctcgcacgactttttcaacgtcttgtctttccgtacgtcggccgcgatcgtctcatcagggaccagctccgaattgagcgctgacccttctgcgattcgaacggatcgtcaggtcatcaagctcgacatccttccgtggagaacgcctactttgtcggcgctagcgcgcatcccgggacaggcgtacccatcgctttagccggtacgtcaaacacacttcatcgcgtcgtcgccgtgtattcgacctttgctaatcacaacgcctcgacacaggatccaagctctgtctagagaccgtatgccaagatctgggcgtaccattacccccttcataccagtccaaaggttacaaggcgaatagctggctcgatatcagggaaggtaatcgactttggtataccttggaagcctgggcgagtaccatcctgctcatactgtctggtaccattctgggagtctcgttggtctatggcagattatagatgcgatttgtagcaaccacattgtaaattcgtgatatactggctgtttgtgcgctcgaggtatagatgtacaacaagatcgagaaccgtgcggtggcctaccgtcgcggacccggcacttcggggttcaagagcggccgtccaggggggctcaacaggctctgaccttcgcgtggactcatcgggctcacccctgtcccgttggtagtaatgttcgacgagctgcttttccgaccaatgctccccacgtttggcggactcctcatcccaccggcctgtgtcgacgtgaccgacgccgtcgagtaagtccgtgatcgcgcaaatccaaatagaccaccacctggcgttgtggatccgcgttcggtggcaggtgtgcctggatgcacggatcccggtggtgagagtggtgaattttgagatggagattgattgggttcctgcggcgtttgtccttgcgccgcctccttgagaagaaactcgacaaagaggttggagaatgactgtgccacgatggggggttttccaagcaagtcagctacgaccattgtggtcagggtcagccacgtaaactcacctcgttatacgcgtctggcgcagtctcttttcctttgcccttgccatccgatttggaattcgatggattgctcccggtttcgctcgctttccgtctcagactgttaggcccggcaccagcgccgacacgttgtagcccggccttttctctctcctcgtcttcccacgagaggatcgttgccaacaaggacaacatctcgaaacgcttcggatcagctcgaggtgtcgtgatgaattgcaacaggatgttggatacgaggcgtctattggaacaagagtcaacatcgtcgctcggcgaagaacgacggccagactaaccggtcgacattggtccccgacgtgtttcgcctcaatcttcttagcgcctcggtcagatgctcctgcgtcacaacagctgccattacggtcgtcgtcgagattcagtcaaggccggcgcgatatctacctggaacgatgccgactcacaatcgtgcctcagcttgcctatcatggccgtcttatccttgagttccttgtccaattttgcagatcgacctgcatcgttttgtaggttcgatagacggttctttggtgtgcccacgccgatcaattgaaaggtctcgacgaactctcgaacgatagcactcacctcggcctcggctgctcgcgatttgtactctgccagcgaagaagcggcataacgaagctgactctccaattcattcgtagcctgtgcaatttccaggtctttggctgatggaagggcgaagtgttggcgaccgcgacctttacggtcctttcacaccgttgcccttttgcactcaccggcttgaaactctcccaggacatcctccaaattgctcgcccgtttttcttcccgcctccatccatcttcagcgccaatccgtctctcttcggcttccatcatctttcgttccatgcccctgcgttcctcttccaacctttccctcttctccctctcccttccggcctcctcttcccactcttcccgttccatccgtaccctctcgagatcgcctcgaagttcccgcagttctctcgtgagggagacgacgtcggaggaatcctgctcgctcttttgctgattctctagtcggagttgagagagctgagagtccagggaagcgttttcctgggatagagaagccagttcggtctggaccgtcgtcaccgtcgcctgagtcgcctggagatccgttgtcagctggttgatgaggacttctcgtcgatcgagttcttcctgatgatcgcaatggtcgagcaaggccagcgtgaaatatcgtctcagtctcgacaatagcgtgcgatggtcaagatccacccgggtgaagagggactcacggcatcctccttcaacttggttcccaagctattccgcatggcttgcagtttccccaacaaggtccgatattgcgtggacaaatgttccttttcccgaacggtctgggccagctctgcctcgaggctctgtatccggtcctcgtcgtcctcgacctcgtcctgatcatctcctccagctgaatggtcgtcgtcggcgtcttccgcttgaacagggatatcctccactgtctcgtccgttggtgcaatctcctcgacctcgactttaggttcgattgactcggcttggacctcgtcttcacctttgtcgtccgacatcatctcccgcgtggctggcggaattgtcgcgtctgcctcttggcctggcatgacctctccggtatcctccatcgccgtcgtgtctatccccgtttctacatcgtccaagctcggctggtcgttttgcttgtccgtcccgttgaccttggtaggttctgttacggaccgggtctcctcgtcttcctgcacaacctccacctcgtccggctgtaccgtttcaagaccggcgacattcatgaccgcctttgattcctctcgaccagatttcccttcgtccactttctcctcgactcgatcctctacgacctcttcatcctcgtcaacgttgaccttttcatgttgatctggcgacgtcggtctggacggtcccgtcgaagccggctcgcgattgggtgtcttggttcccgatttcgagcgtttggcattcgatttcttggccatcttgacctcgaagcataacctattgtggaagatatgatccgggggagtgagaggaataagagatgatgattctgtcggcgaggattatagaggtgcaagtgggtaaaggttgactgcaagtgacctattatgattccaatgcatgacacgttcagtttcgaggtcgaggtcgaggtggatcggaagcaaatttcggggaaatcgggggttgtcgaggtggtttagacgtatttctactttcaactaccaacctgcaattacaattactctgctcgtaaaacacacagctagtacttgtactgccaaccctcacaaaccaaatcgatcctataccatgtctggagcaaccgcacgtgtcgtgcccgtcgccctcgtcggtcttggcggagtaggagccgccatcctctcccaactctcctccccacctctggctcaaaagttcaaggtcgtcgccattgccaactcgaaaaagtacctcttcaacaaggacggagggatcaagagtgatggattcctggatcagctcaacaagagcggcgtcgagctcgacgttcctgggttgatcggcaagctgtcgaccttggccgacggtgagtttcacccgaagacgccgggtcaagacgtctcgcccacgacttcccgccgtgactgacctcgtccgaaacgccggcatacaggtcctgcgatcctcatcgactcgaccgcgaccgacacgcttcccgctctctaccctaccatattgagcatgaacatccacctcgtcactcccaacaaaaagggcttctcctcgggcctcgagctgtaccaaaagatccagtcgacgagctaccccaagacgggcagtctcgtttacggggagagtaccgtcggtgccggactccctatcctgagcagtctcaaggatctggtcgaaactggcgacgaggtaggtctctcgggctgaacagccaaggtcaagttgaccttctttgtacctgtcgacgctgatacgccagtcgactttcatagatcatcaagatcgagggtgtgttttcgggaaccctgtcttacatcttcaacgagtttagcaaggtcgaaggcggtgacgtcaagttttccgaagtcgtcaagatcgccaaagacaagggatacactgtgagccagtttcacccgaaataacagcaacaagggcgcgagatcatctagctaaccgaaccctattaaatgaccgacccaggaacccgacccaagggacgacctctctggctcggacgtcgcccgaaagttgaccatcctctcccgtctccttcccgattctaccctgccccactcgaccctgcccgaggggtacgcttccctccccacgcgatccctcgtccccgccgctctggccgaatgcaagagcaaggaggaatacatggagaggctcgaggaaggagacgaggagatgagcgcgttgagggaggaggcgaggaaagagggcaaggtcgtcaggtttgtcggcatgatcgacgtcaaatcgggcaaggtcgaggccaagctcgaaaagtgagtcacgggtcaaggtgtccaagcttttctttccagcagatgcccggggattcgtgacgatcgaatgctgagctcgtccgcggtcgacctgtaggtaccccttcgatcacgctttcgctaccgcccttcagggttcggacaatatcatctcctttaccaccaagaggtcagtcattgcggggagtgtctaaaaggcatggtggcgtgcggctgaagtattatggttcggatcacaggtactcgccccgacccttgatcatccaggggtccggtgccggagcagacgtgaccgcgatgggtgtgaccgtgagttggtccctaccgcgaagaaaaatggctcacctggacgttccctcggctgactctcgtggtatcgcagagcgacatggtcaagatttacgagaggatgaggttgaaggcctggtagacggtacaacgggagatgagacatacaaaagcggtgcaaccgaacgtatatgcaaaatgagagagatgaatcgcatggttggtgcatgtgatgatcgcgggttagcgcgaaaggtacggacgaccgatatgcgaggtatacgggactttcagaccgacatcttggaggaccctggatgcatcagcccaagagccagattcaacatcgattcgatgacggctcgatcgacatcattttgaccctgcgagagatcgcacgtgcggtgtaatcattgtctctcacactttctgctggcattgcggtgggctttccgtcgtgcatgaatgtcgacactttgaccgctgtaacgcttcagttcttccacttcatccccgtcttgctacaaccacatgtaaattccagagatctgggcttttgctctggaggtgtccgttactgactggaggagggtatgaagggtgaggctaacatctcccgatcaaatcacgtgattatcgttttacggaactaattcacttggtatcgctcggaagtatattaatcgatgatcgactgtggtcaagtcgggaccttttagaaatgataacatggcaatccatcgctccatcatcagatagctgcctttaattgtagcaccgaattactgcctataagccgtgccaagtttcgaaacacaaccggtggactcactgttatcatactcgagccgggatataaaacctgtcgaccatgttgtcagtcaatcaaggacgacccggcgatcaacagctggatcaaggcatctttcacctcatccacgaagtatacaggataattcatgtgagttcgcacagattgtagccgatgaaaggtgtgggacgatctgataactttggatggtcgtgctcgtcatcaggaaacaatcggtatgtccactctagccgtctgatcagatagactacctagattgagttgacccgtgtcatgtccccagatggcgctttgacctgggagtgagtggggaaaggaacccatcgatacagtcgtgtccgagactgacctcgtttgttcaactcacctcgtagacagctgacctcgccagagttgaactactcgatcgtccggccgctcacgaaaaagctgtccaagcagaatgatggatcgatgatttacgtgctcatggtcaaccggtgagactcggcacaccgcacctgtaacatctgcgctgctgattcagtcttcacatggacatgggaatcacggtaggattcgcttccttcaggtcgtagagcacgacctcgccttccaagctctcaactctacccgagcgaacctctgcgagctcctctcaagtgcgtgggcatgatcttcccgctactcgagaaaaaggatgacacgttgacttgcgacactccacttctgagacgactgtagtgaagttgttgaggacattctccgaatcggaactcgaatcggtttcgatcctcacccgaccttattcgccgttctccgtgagtgtaccgcaagcaggaaagatgacaagccaatattgatgatgagatgtgtcgccgtagggagcacctgacgaggtgtgggagagcatgactgacgatgaaaaggaggatgtggaagaggagatcgggaacgctttagaggtgagtcgtatctttccccttgcacaaatcctcgcatcttcaagaacatgccctaacccatcctgactgatcgattgctaccgcttagatggcgatagtctcttcgtcaaaacacttcttggcaacccctctcgcacaacgcgtgatcgatgccatccactcgggagcgatcgtttatacttcccgctcgagccgtagcatcatcaatgatacctacgtctcttcgaaccggaaaagacgcatcgcggacaatcagaggagacactctgtcatctcttccactgcttcaggtcggagcgtgcatgtgacgaacggggatggggtgtatgtatatgatcctcgggaagctggatggctggatcacacgcgattaagagtccctcgttggaggaagatgatgtgagccgctggtggtacgtgcacacggaaccgagactaatcagagattccgcagcgaattcatcaacttcgccgtgctgaccgcactattcatgtggaacctctcggcatcacgatctgagaagcatttcagccatattcacctgccagagatcctctttgttgtgtactgcctcgggttcagtttggacgagctcgcaacgactaacgagaacggatggacgatctactttgcaaacacttggaacgctttcgacattgcgttcatcggcttgttcttcgtatacctcgtattgaggatcgtcggactagccactaggagggaggaaaccagtgcactcgctttcgatctcttgagcatcggagcgagcatactcttgcccaggctgtgcttctttttcattaaagacaacgtgctgatcatttcggtatgtccacgttgatccgattgttcctttgcatcccgcttacgatttttttccgtcagctcaaagccatgatttccgactttatcgggttcatggccttggcggcggtatgtttctctggtattctgttcacgttatggaccctcggcaaggagacctggaccgtcaggcgtattgcttggttgatgctgtgagtcagcgtccggccggtttggtgacttggctaaatcgcgtccggtctctgtactggctggatacaggcaaatctggtgtgagtaatcgatctcgccgtcagtgtttggcgatacatgcctgacacgacatgtggcgtaacagttggaagtagttatctcggattctcggaggccacaaccttccacccgcagatcggacccgtcgtcatggtcgtttacgcgcaagtctgctaccgtttgattcattatgcggcatcctactcaatcccacttcaacctacagagcgctgagcaacaccctgctagtcacgatcttgatctccatcttgtcgaatcggtttgccatcatcaactcggtcagtcagcctgtcgcccttccatggcgatcattgactgggagctgatgcgtttccgcattttctaccgttagaatgcccgtgaggaggtaggcaggttgtcgtacatgtgaagcgaggttttccgctcatctagtttatccccgcagcacatgttccaaaaagctatccacacggtcgaaggcgtcaaggcggattatatcttctcctacccaattccgtgagccagagtcgttcgccatgatagccgtgagctgagtctacttcaatgtctcagcctgaacatcatagcacttgtggttatcacacctctgagctggatctctgatgcacgcactttgcatcaaatcaacgttttcgccattcgtttggtcgtaagtacttggcaatatctagacggatcggcatcctcaagacctgatgaattcctcgatagtactttccgtttctattaaccatctccggatatgagcggtggcgtcagagctcttcgagcaaccgaggcatccagttgaagaggaacacgtcaaggaatgctcgtgcgatgtcgagcagggccacttctggaggaacgatgttcgagtacgcataccacgtgctatattgagagctacatcagcctgatacctccgatccccagatcattcctcggtgccagcactcaatccaccatacgtgctgtgtttgagcacggtgtcgacgtcatgcaaatcgaagactctgccctggacacgcctagcgcgcgcactgacgaggaacgtggggctgaccttccgagtcgaaccaaaagacaagcttccacaaaggcttcgccgctcggcaagatgatgacgacgaggatcgacttgccgagcacgccgttggaacaagaagaagtccaagctggatcttccgaaaaagtactcgagattgcggatcttcgagccgagatcaagcggatgagacaagggatggaaaggatggaggagatgttatcaaacgcgacggcctaggatgatattgaatgtgatctatatattcagaactagtctcagggaaacgcaactcggtcacgagaaccaagaaggatttcgagaattgatcgctccaatgcccggtcgacgaacgaggacatagcgaggtgatttgaactgtctcgaatcgtcgagctactactacagactcgcacccgattagtacttcatagggtacccgaacctctcctccttgggtgccttggtgtagaccgccctccctcgcccccaaacctccttccaaaccccatcgacgacccgttcctcgtctttccattcctgcgaagtcttcttgtacccgaccttttgtccgaaccccttgccgccttgtctgaacatgaagatgcccttgatcgagctcgcgtccgagggggtcgaggcgaatcggttctcgaccatccatttacggaggttgaaagccgtcctgctctcggggacggtaggcaaaaaggccgtcgtagcggacgagtcgagcttgtcccccttatcagacgacgaggccgtaggcgcgggctgacggaggaggagcagggtgtatcgatggtaaggcgtctcggggcatgggtgagggggttggtaatcaagtgaagcggtgatggaggaagggatcgaggtggtgttcctcgagatgggaatgttgggtctggttcgagtgggttgcgtagttcaaggcaacaacgtcagttctcgtccttggcagccggacgtcgactctgaatcggggaggagtaacttacacgatccaatgacagtactctttgtaagagaggttctctgcgtctgggagatcggggtcgaccatgacgagcgtgtaaagctgttccgtctcgtcgttcgtaaacgccctcaattcgatccgaggttgctccagggtctaagaaccgagacgaggggttctcatcgatgagcatacgagcacgcagcggggggataggaagtcgcggtcggtcggtagctcacctgggaaggaaggaggtagtcgccagggacgggatccgatactgaagggtaagagacggacaggtcgatctctgggttgggcagggcgacgaggtcggggacgacgttcatggatatcactctttccatctgaaacatccaggtatgagcgtacaggaagggaaaaacatcagtctggaaacaggccgaacgtctcgagccatgcgatcgggtgtcgaggctcaccagtcgatcgagcttgcccagctttcgccatctcctctcggccaacacgttgagggcttctctgtcaccagcttccactccctcggaagagacgtcgttcccattctcgtgcaaccacctcgtctctggtcgagcgatcctagcctcgagctcggctttcttcagggcaatctcgatctcgctcttcagctcgccgtcttctaccgtggatagtttggtccgcagacgttcagccttggacagaagcgaggacgagtgttgagcgaggaaggcgagggacgcatcgtaagccggattagaaccttcaggcagaggtcgggtccaggtggaagcgttcgagttgatcgaggtcgtcgtcgagagcgaacgtcttgacgatgtcctcaggcgtttcgagaggatggcggtggttcgggatgcactggacatgatggacagccgactagtcgtgttctctagaactatgcttcaagagtgttcagatggtatgctggttagttgttccgagtctgaaggatgagagggagtagtagtaggttgccataccttcttgtcatttgaaactttgtcgctgttgatcggatttacggaagctgacgcggggaaagggacgggccaagttgcaggtatggggtccatattcaactactattgctgctattcatatcgactactttccactttaacagcaccctctatcaagtcgagcacgatagcccggagatctcactatatcccatagcagagccttgacgaacgacccacaaatacagccaatatgcgctcgaccattactcgactcgccgccgaggctactcattctcgaaaacccatgattcaattcttgggcaagcgttcgttcctcgaacacagtcagttcctcttttctttacacctcacaagagtgtccttctgactgtctgcaattcccttctcgcagagcctcacgctccgagccctcacccggccgccccgaaagacgttgtcgacaactttcaagcatttctctccaaattccaatccacctccacctcggcttcatccccttcgagcaaccccaagggtcaatccctagaatcctcggctcaaggtcaggtccggtatcatccttcttcctccccctccaactcggcgtcggcagccgtgaacaaagggtcaggcaagccttcagatttcgatacctactttatggccccgcagagactatggaggcccaaaatgttctccccggaagagctcgaggctgtcgaggtgaggtcccgagctgcaaagactggtcgataggtacaggtcatcttactgaatgcccgtctgtggttctatagtctggcggtgccaacgcttggtagaaccgtattatcgcccccctctcgctatttacccctttcaaccaaccgctcattcttgccgttgatatcaacgacacacccacaattcttttcattccaccaccgcatgatgacgaagaagcactctcagcctccgcagctgccaacacacccgagacccacctacctagacgcatggatacgattctgatacgtaaactacatgcgggctttccatgaatatgatcaacaaatatgataaatcgaatcccaagaccactctgaacaacgcttacctccaggcggcatcatgttgaggtgaggttcgttgtcgactaggctgtgagcattgagccgtctaggtagaaaagggttcagggatcgtctggtaaggccagtcgacggcacatcccgagcttaaagggccggggaaaggtatctgcatcgtcttcaacaggctcgtcctactggattttgcacatgtgaggtatgttccgactatgtgagagcctttacaacaatcgatacgatatcgcagggtaggtcggggtgcggatggcccggacgctagaatggtcgccgcgggggggcgctggttgatcaatctgcccctgcgctatcaccaccgccatcccccatatcggcatcgagggcgtccggatgaagatcatccccgttcgcgttgaccaatgctggatcaggcgtgggatcaggcaagaatgcatctcccgctgaatattccggggctggcagaccattcgaggtcgggggcgcgtctgaaccggtcgatgaaaccaagtccttgaatcctcgcgaggtgctatctgttgatacgacggtctgctgatcctcgtcgatatccagcgctcgcatccgggtccatgcggcagcctgtagatcagcaccgatctttgccacagtcgtctcttctctgggcgaagtacgcttccgtcggagagcggaagtggcccgtccgagactggacccagaccgtttgatgagatgatcccaaaaggcttccgagtgcagctgacgctgaatccagactttgtgtccttgagcccctagaggacctccattggagtctgacggatgtttcgactctttctcggcgtacgactggctccactctaagagatcgtaggggttcacgtggcgcagctttcggatcagtaactgggtgagtggagcaaccgcggcaggttctgcatttgtggcgttgctctcgaaactcaggtcttgagtggacccttgccagcttgcatcggggtaccgcgtaaagccgctgtaatcggaagtccctggggtccggaggccggtggcaacagaggtcatcgggccttgctgtctagaattcgccatggactcccatatcgccgcaatagattgcaaggtcgaagcaatgtcggcctctgttcgaattccgctcgaagctgtgagccatgatgacactggcgtgttcccgatggtgccttccgagtaaacggatactggtggcaggacgtcagccatactgataaatgtttgaagctgcgtgagtaagagcgaagtgcaatccccaaccacttcatcacacgaatcgaatcgactttggccttgtcttacagaatgtcgccaatgtttatatgatctgtccactgcgctatactcttcgccgcgatggtcaacgtcatcgcgctcagaggggtagcagacaaaggaaggtcattctcccatcaagtgagaagatggcgtggagctatggcgtgcacccgacctacgcacagcctcgagcggtagcgcgtagatgaataacgtctcgaaaggtcgaaatgatggccggcgaggcgattttgagccgggtttcgttcctcctctgttatggcggagctaggacatggacccaaatctaaccgcccggccgttcagtgctccgcccgtggacatttcgacagacgggactcacctttacctacgaccagatcacaatacactaagaaatcctcatgaagccgcccatcgctgatgctgttgataggtgatcgactttcgattcgggttcttttgtgcgggtctttatgcaacatgtactcatagatgtcgtttccgagagggtgactctgccgatgggattcgacctccaaagtcactggttttggagctacttcttgcaatcatcgaatgatgtagtacccacggaatacaatgaaaacaatttgcttagccctatctacctcggtttcatagtgtgttgcaccatttagagtagatctagatctggggcgatccccgaggcgacacgtatgcagtcgacgccactaggcgtacgagctatgtataacagaagagtagctaacagatgaagttgggtcaaactgcatgcaagtcaccatcactactgaactttgattcaactaccgccacttcatcagcatagatcgatagaaggacggtattcttcatgttgcatgatacttcgagccgggagacggaagcacgggagtgtggaaattgtctggtcagataagctatcgtcaattgattgttgacactactcccgtttccgatcccggctccgagctgtagacttcgcaacgtaggctgaatcatgctcctgctatactgtgactgtgaatcttagtgtgatgaaccttcaaccttgtgggacgatgcacggccgacaagctcgattgttcctcctcaggggcgggttctgcagcgagatagaaacggagcgtgtttcgggggttcagtgagttccgacaggctatgagccgggcatattctcaccgacgtgtgtatgtctgtcggtctcaaagcggaacagctttcgtgataggcggactgtcagagcaaccatattgtcgaggacacccgcagaacggtgggaattctgggaagatgtcgtgaaatgaactgaattgaagtgtacgaagtatgcctcgaagctatcatcgacatcgaagtccttctcaaggggaatagacacgatctggcatgtccaggctcgatcaaggttcacgtttcggccaggtttataaatatgatgacatcgcgcgcgtaaggggatgagatgattacgtaatcggaaattggaacgataaagggttatacctacaaactctaatctaaatatctaagatctacaatctaggagcgttgatgacaatcgccaacagacaggccgaaccggtgataacaacgacaatcgttccaatccagccgcagtagatccacccaatctggcgccagttggtggcacgccaatccccgttgcagagcgagacaccgacggtagcaccggtgatgcacatggtggtcgagacggggataccgtattgcgaagcgaggatgacggtgatagcggcaccgagctccatggtgaagccacgcgagggggaaatcaaggtgattcggtttccgagcacggccatgatgttgtaaccataagtcgccagaccgaggaccaaggcggcggctccgtagacgagcatccagacctcgatgtcggcgttctttccggcagggagaccaaacttccaggtgtagtagatgaccgagaagggaccgatagcgttggacaagtcgttggcgccatgggcaaaggaggcggtacaactggtgagcacctgcatgaaagtaaaggcgtactcggtatcgttgtcgtattgcctggcggcaccgtgaatggcggccatcctggcttcctccttctcgtcacccttttgagcttggagagcgtggacgtcgaccatggatccgtggctgatggctttccagaggacgggtgcgaccttgtatcggaggacaatccagatgtttcggggagcgagagggaacccttcgacctgaggggtctcgacctcgcgctcgagggcagactcgcggggcagtgcttcgggctggtgaggttcctgcaagagctcggcagccttggcctgggcggggttctcgatggcagagttgttggaagaagagtcggcacgggggatggccttttcagccgacatggcagtggcaggagcgtcaccggtctgggggagggtctcgtggtcgagagactttcggattcggtagtccttgacggcggatcgagaaccggcatcctcgggagcctgtcggttccaaagcatgggtccgaggaaaaagtggtaccatcggagggctatcgaagaagaaacgtttcagccgtggtcgacttgccaacggatcctctgatgaggctggcgcggttactcactgtaatccttcttgatgaccttgccatagacaaacggcaaccagaagacggcggccaagagtccgatgacgaacccggtgagcaagatggcggcggcggtcttgccgggcgacatgtcgtcgagcttgagcgaaggcgatcccttgtagacgatcgacatggtacagacacatgcgacgaccatgaaccagaagggaccggtcaagagggcccatcgggtagggttggcccggacgaggacgatgtacttgacgagcaagtagcagaccgaagcgaacgctgcagccatggcgggagcgatgacgagacctccaaagatggcaccgagacctttaccatcgttccaaccccagttgggagcgtcgaatccaccgacagcgataccgacaccggcgacggcagagacgatcgagtaggtggtcgatacgggccatccgagacgggtggcgatcgagagccagatggaagagacgaagatggcgttgacaaaggagagcaattgcaggccggcgttgttgttgaagatgttggcggggacgataccgttcttgatggtgctcgagacacgagcaccgacgaggacggctcctgcaaattcgcagacggcggcggcacaggtggcctgcctcatcgtcaacgacttggaggccacggcggtcgcgaacgcgttggcgacatcgttggcacctagtgaaacgcgcgagatcgacgtcttagcgagagttttttacgcttttattttcatctgcgggagtgtgcgacttaccgatcatgaacgcatcgagggtacagaagatgaccccgaaggcgaagaggtaatcgtactggtggagagtgggcatctttgctggatcgaaaagagcttttggaggggaagagtcctaggggtggggcgggcgaggggtggtggtactggctgttggctctgagagtaacgagagacaaggaaacaagaagcaacgatccgatcgtcggagtaaaaacctggatggatgaatgatgatctcgtgttcctatatacaaaaggtcctgatccggttacgactccgaccgtccacatgttcccgttcgtccaggcaagcgatctgaattcgactctctgctccctttttttttctctccgacgcacgttcgaacgtttatgtgtgcgcaaagtgcgttttgagctttgaagcagaacgatacgaccgtgagtatggtgagacggcaccagggcggcaggagctggcacaggcgtaggagcaggggaggattgtcgtcgtcggtgggtcactcgtaaaatctcttggcatcaatcaaaatgttcgtgcgtgacgtttcaagcgcggatgcaaaggcgcgcgccagagagagtgtgagtaaaggggaaccggatgaattgatgttcagtggcaccgggtcgcgcgatcagaagaggtcatttcccgttgccgccaaacccgcagccaacggtcctgcccgttcatttacaacccagccgctcagctggtcggcgtctttcccctgacctcagttgtcgaacaatcatgtccggtcgtggcaagtgtcaaaacgttcgagacgtcgcgaaagcatgcgccacaccaatttcgctgggccaacaacgttttccgaaccccccctatccgaacgaccgcgtagctcgcaaagaatccctgggggcggttgatcgcttgcgtgcacatcacagaatccgagagatctgccctcgagcgtggccggccgagcgagcggggaggggggtgtcgaacgtttcccatctcttggcatttcgtcgaatcatttcttcccgcgtgagcaggctcgtgcctgaaaagtccccgcagccgcgcggcagcccgctgggcaggattccgtctcccaacccatccgcaaccgtttcaagatgcaccgaaccggaggaccgtacttcgctctcgaccggtgaccgatctctggccctctggttcgaccgaatcagagcgggttgtacgagtcccgaccgagaaagtggagcttgacatacacgttctcgcccaacaatgcttgggcagaggatagctttccatgatgttctcgcctcgaactcgttgcctgttcctgccttttccaccgtttccggcttacagtcgcaaagacacctcgcgccgctcgactgcctgggtgtgttaccgattaccacacgatgccgacatctcggacatgaatcaaatgacaataagctattttacgatgacggtatctacatgcgagcccaaacgatttttgaaaagaaagacattgaaacggatcatcaggaatcgagacgtcccccggtccatccaggcaactcaagcggacaaggcttcgaggcgtcgttgcaatcgatcgcgcgaagcggattgcatgacctgaagtcggtcaccctcgggcaacgatcgagacaagggtggcatggtcatctgttgcaagcgagcaagcagcgattcagaacaaggtcgtgtgcataacgtgcttcccatgcaaaggcatcctactgaccattcgctgagacgccaatgcggtggcgaccttttgcaccttggcgagcatgtgagttcgacagaccagttgttggagctcgatcgatcggtcgtccgcatagaacctttccaagttttcgagcaaggtcgggatccgctgaacaatctcggtcagttgctccgaagcgtcgctcgaagcgctgaggaggtcctttgtccgttcgcaaaggtcaccgtattgcagcaagacctgaaaacggggcgggatgaatctcagctttcggtcgtcgcccccggacatgctcgtggctcacctgaccacccttatgccaatcggcaactctggcgtcctcaagacccgcaagcagctttcgcaagagtcccacgtcttccctcagtacgacttcgggggccaggcgttgaataacaatgttatgagcccggtccatcaggccggcttccttgcatgacaagaattccgaataaacgttgccctggctcgcatacagattggcctggagcaagcgcaatgtatcgtgcttagtctcttgatcgtcgatcggtatacgcgaccaactcaccctcgcctctgccaaccattctcgaggcacagacatgcgctgcaggatctcttccttgtcagtcagttccgctgcatgtcttccaaggacttccttgacggctttcaatcgtctgttgcgaaaggtcccgttcgtataagtggagacacgacttcgcttcggacggcgttggtcgactcacgagctttccttgtccaggtgcaacgagacgaacacggcatactcccacaatccgtcccgctccaattggctggcgtaatcgatgctcagtctgtcgaacgtgcggacgctctccatgacgtgttcttccgaagtgccgaacccaaagacattggtcaagagatcgagcaagtgccactgtagtcgaacatcggtcggcgccttgccatacgtagccgatccagcaagacagctagctggggtcgattgctccatgcatactttcatcaggccaaacatggcgtcttccgtctcggtgtcggttacgagcggcttcgcgggcgggtgctccgagtcgagatgcgctcgaaagttattgatgacgtctggcaaaggctgctcaagaggagtaccgaaccaaaggtgcagtcctaaagcctgcaaccaggacaagccgcgactcatctccacctgttctgccaaaggtccgccttcgaccacgtcgacaataccggccagaagagcataaacgcgacgatacgaaacgtcgatgtgagcgtcggcatcttgcttgcgccatacgtcgagctgttgttccatagtcgctttgaattccggtcctgaccctgcttgtgcgaccaaggttgccaatcgcaaatcaccaccgtccatcgctactgatgtcgcccttgacacctgattggcgaccaacagcctaaacacggtctccgggctcgaatccttcgcattgacttcgcgatccacaatcggagccaagtggtctgccaaccaatccgacaccgcattcttgcgcaccaaggactcggcatccactcgaacctgccccgcgacctctcgattggccagagtcggtatttcgtcgaacaacgctcttccgagccgccaaagttcggcttcatatctcccatcaccccggaacagatcgacaatgtccttgaatcggaccgtagtatcggtctcggcgattggaacgcctttttcgtcgataaagttggtacgttgcaactggaaatccagaagcttgatcatgacttctctctcttcagtctgcttgatgatcgctggatgtcagtcgccatatcaagtctcccggtgcaagtcgagactcacggcatctttactatcaatgcgcgacgacgagaccacctgattctgccgaagcctaatggcatggcctgtcgaagcgagggtcactcgttgcgacctgcccagagccagtcccgcgtcaagaaacgcgccctcttcccccacggtcaccgcgtccttgctctcgatccttttcaatttccactcgttcctctccttcgatggggctgtgcgtgtcgcgccgaaaaaggatcgctgtcatccgtgctcaaagtcagttcgtgaggtttcgatcgacgaaacagtggcacctacgtcgacgtctccgccatcgacctccccatctatatccttctcggctttacgaaaaaactgcagcctcttcttgttgggcctcggtgtcatttcgagatcatctggctgcggagttccatacatccccgtgaaaatcaagtctcgctgtcgaaccgtgatttcgaccggttgttgaatagaagagggtgcatactccgaagcatcgtcatcgacctgactcgatgcgacggaagatctgtcgatctcggaaggcgatccagcagtctcgcctccatcgagcgagccgtatcgttcatactctgcggaacgctcgcgttttccgttgtcattcaagatgatgtcctcttgagcgtccatctcgccctcttcgtcgtccgaatcatcctcttcagggataccatacagcgtgaagtgctcgacggtaaacacccatacaccggtggaagggttatagctctggaaggtggtatccggtacgtgtcgcaaagctcgttctcgagccctctgcttgggatgtttggggtccgtgatcggctgctgcgtctccttgttccttggccaacaatcctctaggctgatctctgctcggtgattcaaaccttcacctggcggtcgttcatcagcgctctgggggtagacctcgcacttgccatccttgaaaaggacgagatcgccacagattcgattcaaggtgtgcttagtaccgagatcgaccggctctaagtaagtgagccgaccgtaacctttacggccgacaacgaagtcctctacgctgctgagatcctcgttggaggcgttgtatagctcgctcagttctgggatggtgtaataatctccgtgactatagtcttcaaggtcgatctttctcgaaaagtctgcccgcctatgctccttttcggtagcggtgtcctcgttctgagtacgcgctacagatgcttgacgagagccgggcaaggtgttgcccatgacgctaccgttgacgctagtgccgtcatgatcggcttccgggtttaggatcgaacgagagatttgaggtgtccgattggccacggccgaactcagagaaagagaatccgtcttccggtggagcaccagcttcttgacaccctgtcttggcgtgaaggctgccgggctgagcgtatcaggaggcggcgtgctgaagaggttccgggcgggcgaaccgttcgaggcggttgaagctccgagaatggagctttgaggaagcgtactagcggcacgagcaggagtcgagatgcctcggaatcgaggcgtcatcttgccagccgagggcgcaggtctcagcgagctggacaagggtggcagggtcttgggtccggtcgaaacgttgatcggctggaatgaggggggaacgctgaacatgccgttagcgccgtatgggttgttgacgtcgatgttgaccggaggttgcgattgactctgctgcagctggttggtggacgagttgccaaacaatgaaccgcccagattttggttgttttgttgctgagcgccgccgccaaacgagctaccgaataatcccgagcctcccgtcgaagcgcccaaggtcgaaccggtaccggactgaccaaataatccagagccagtattgttcggcttggcaccgaagagtccaccagtttggttttgctgaccttgctgagacgcacccagattaccaaacagaccacctcccgtttgctggttggtcgaaccgaacaggccggtggtaggctgagcagcgggctgaccgaatccagtggactggttggtcgaattgttaccaaacaggcctccgccagtgtttccggtctgagccggttgaccaaagagaccacctggcttggcagcaccaaaagtgtttgaccccgtgctaccaaagagaccggtagatggctgctggccggcaggttgagcgggctgcgcagctgcaccgaacaacccgcctccggtctgcccctgagtctgagaaggtgctccaaaggtgttggtcgtgccagtcgtgctgccaaagaggcctccggctggcttgctgccaaagagaccgccagactgctggggctgttgctgggattggcttccgaacaggcctccagattgaggcgcagtggcggcaggttgtgcgccgaacccgaatccggtgctcgcctgctgcgtggcctggggctgttgagcttgctgattgttttgaccgaatccaaagccggtcgaagcacccgtggcggccggttgaccgaatgtgctggacgtcgtgcctagagcacagagtgttgacggatcagtcccaaactcttctcgagcgcaaaagctgacgacacttactaccagtcccaaaccctccaaaggcaggcttggcttggttctggttgttcgcgccgaacgagaacgcacctgaggcagccggctgagcgggttgctgctgttgaccgaacaatccacctccggtagtcgaagcgccagtgttggaaccaaagagtcctccggtggttcccgtcgaaccggattgtccaaacaatccaccggcttgctggttctgctgaccgaaaagaccaccagactgctgttgaggctgttgttgagactgttggccgaataatccagtaccggtgctctgggtgttcgagccaaacaggccggtactagcagccggagctccgaacccggtgctctgctgaggctgaccaaacgcggtactgcccgcgggttgtgcggactgaccgaacagaccggtgctggctccagctccgaatccagtagaggcaggctgagccgcaccgaagagtcccgtcgacggttgttgagcgggttggccgaacatgcctcccgacgaggagccggcgccgaaagggttggtcccggggggaggagcggtctttctgttctgctgatagtcttgcaaacggagttcctaaggtggacaggagacggcctcggtcagctaaagctcgatcgcgatccggccgcgagcggtgagacatggcttacttcgagactggcacctttgtagggatccatgcaagtgatggtctggtacaccgtataattgttggtgttgccgtccttctccttgacgggttggtatgccgcggtagcagtcccattcgtcaccggacctgcatcgagaaacctgcccgcgttaagcctctgatgctcgaacgtcgcaaatggtcacattgtactgaccaggggcaccggcgggagcagccgcaccgaacaaccccgtgccagcaggtttagcaccgaatagtccacccgtgttccccgtagaagcggcgggagctccgaatccggtcgtagcaggcttggctccgaacccggtcgaggtcgatccgaaaagtccacccccggtcgcgggagcagcattgttcgcagcgccgaacccggtagacccaccgaaagtcgatcctggcgatgaggaggcggtaggagagtggtttcagcaggaggttaagggatgaaggcatggcgggtagactcacctccagcagcagcgccgccaaatagacctcctcccgtagtactgctggctccgaaagtaggcctcggttgttgttgctggccaaaagtgcccgtcgaaccgctaccgaaagctccgccggtagaacctggttaatagcatgacagggtgcgcagagtattagtataccgggtcgtaaatggctcagccctgccaacaagtgatcctctgacttaccaaaggcgttactctgggcgggagtactaccgccgaacaatccggtagactgttgttgtgcgggctgagccggttgaccgaaaagtccaccggtctggccaggttgttgagtctgaccaaacatgccaccggctgttcgagcaggtcgaggtaggactgagtttttggatcgcacgcccgaagtactcgaagttcatacgtactttgctgttgaggttgaccgaatccggtagaggtctgaccaaagagtcctccggtctgttgaccttgttgaggttgttgaccgaacccaccaccggtcgaaccgaatcctcccgtttgtccgaacatctcgattatagaagattccgtctactggttgagtcggttccgatcttgctatcgagctcgaagtacacttttgcgagcttgttgtttgggtatgcgggttcgaatcgtagcggttatgcgaacggagactgatgttccgaccttgatccgcgggatcgagcctcgaaagttgctagagcgagagtctatgtgaaagacgatccaactagcgtttgaacagagttgtgaggagtgtgtatcgaactcgatggttcttgcaaggtggaatcccgatcaaccaggatgcaagtgacgacgaagctagagctagagccagagagcatcatcacgaactctcaacgtgaaccggctcaaagttctctcacgcgtctcccccctccccccctgaggatcagagctgagacctttcgcgcaaacagtcgaatcggatcaatggatcacgtttcacttcgatttcttactactcaacactcgtctctgcgggatgtgactacgatgatacactactgtctactactcatgagatacttgcacgagctcttcattccttgtaatcttcgaaagcgtcgtatacccaccggtccccctgacggccctaacggatactttatactaaaccccgccatcgtcgagatcatgcttgtcgtcagtgaatacccccatcgttcgccccccatgctatttacttgtctgcagctgcacgatatcggcttgttcaggtacaggtgaaagtgaggaacgctggctcggctgaatctgatctcaggtgattaatctgagtagccaagtggcgatgactatagagaccaggagctcgtgcgcaacagcgacttgtagcaattcatgatacatactggattaaagacgcagagtgaacatctgatgacgatgttcaaggaagacgtgatcaagcttcgatgatgtcgtacacaagaggacgagaattcgaatctttcctgtcaacccaatcgagcgaggtcggtagttttgatgctgtaatgacagtggacaccacatgcttcaggatcaagactggggtacgatctggcttgaatgataatgtgcaaagtcatgtcaattagctagcttcatgcgtactatagtgaccggtacggcttgagcaaaccttttttttcgtggctcaggatgtgtttcccaaccgcatacaatcagcccgatcacgagcaggcaagccacgagtcgctgcatgactgtattcgacccctttttcgttcatagtgtgacaacacccataattgacggcaacgcgcccggctcatctcgcccaagatgggtttcgcccgtcaggaacggggcaagatgcgatccccctcgacctacgtctggcctgttacaacctcggaggtgcggggcaaactatttgccatctctcattcccgacccttgcgcgtgtgtcaacatgatgcctcgtcgtgtggagccagaccagcggatacattttgagggctgcgtgaggggaagtcgccattccgattgagagcgtgtctgctcgctaggcccttgacgtcccttttctcaaaaagcgcctccctcgggcgaggacttgagatgaacgacctgatgatcggcaactgagtagctcagtctggtcaaacgatgtccgtccccgttccattcttgtcgacgcgttcctcgaacgcgtggacgatcaaaagagttgacgcgccgatcatcaaagagcaaagaaatcggatcatccgaccatggtcacagagagatctacaaccaacgtccagaatacggcttcagtcccctcccgattatcgactgtccccaaatttttccttgcaagattcatctggttctgagaacatcgtcttcgtaatctgaacaccgactccgtgacgccatgcaaatccggcgtgctcgaccttcaccttgaacaacccgcatccttgacgacgcgctcgtcgacgctcgcctaatctggaagagcgatcgtccagaagagacactcgatacctagcgcgtagaggtacactcgacaaggatgggtatctctggactgttacctctcttgaaggacgtgcagatcaagaaacacgtgtcggatttcaaaggcaaaaggtgagtcgggcggcttgagcgatctattcgtcatccccggtcgagcgtctcagaaaactgatcgatggactgctttgacgtctcgacgtctcctattgcctccaaacccgatacatctctacgacgaaaacgtgcgtctctattcgtcgtccatcctggttgcgtagcctggcgatcgacggctatgtctggctacaccgaggagctttcggatgtgcagaagatctcgtgaccgggtccaagacgaccaagtgagtcgacaacgtgtcacccctgacccgcaactttactaatccggaagtatgactacaggttcgtcgattatgcgatgcatagagtcagaatgctgaggcaccatggggtcaccccgttgatggtctttgacggtggacccttgccggcgaaacgcgggaccgaggtggaccgagcatcgttagtcacctcgcatatccaacttttacgatgactcgagctgaaacgatcgcattgcggtattgtaggaaacgagcggatcatctagcccgagcgagatcattgacggtccagggtagacacaaggaggctagggaacattacacgaaatgcgtcgatatcacacccgagatggcgcttcaactcatcaaggtcggtataccgtcgtctcgatctcctgttgcttccctttgctgatggcaacgtacgtatcgttcggaacgtgctaggccttgaaggcggagcgagtgccctacattgtcgcaccgtacgaagccgacgcacagctggcctacctcgaaaaggaggggatcgtcgatggaatcatcacggaagattcagatctactcgtctttgggtgtcgaaacgtgagccgcagtcttcgtgtctaaagacgctgggaaggcgagcgagatcgctgatatgcccgtgcgacaggtcgtttacaagctcgacggggatggcgagtgtatacacatcatacgggatgattttccgacgtgccgcgagtttagttttgtcggatggggagaagccgagtttaggaggatggccgtgagtcggttgatatatctcgcccaccttggggtcaggctgattggattccggctctgaaccgctcgacagatcctcgcaggctgtgattacctcgattctatcccggggatcgggatcaagacggctcacaagctcctgcggaaacacaagtcgatcgaaaaggtcgtccagaacgtcagactggacggcaacctgaccgtaccttccgactatatcccgcagttcagattggccgagttggtctttctgcatcagcgggtctatgatccgaggactggtaggctggacacgttgctacccgtcgccagagagggtggattggaagaggtcgaggaaggatacattgggcctgacatggagccagagctggcgaaaggaatcgctgaagggcgagttcatccggaaaccaaagaggagctagaggatctgtggccagattatcatcctggtgtgggacgcgtagagatcacgcgcacgtttgcctcgtcaagcaagaccggcaaggtgagtacagagtggactgatttcgccacatcagtgcgtgtgactaatccgctctgacgcttgctagcagaacaatgccttgggggtttcgaagcgtgtcaacatttcagggccgctggatgccttcatcaaacgtgagagacactgtccgtttgcgtcggtaacaagccgaggttgacctggttcacggtcgtgcaggtttgcctgtcaagaaggatcctccggcacgccccacttttgtaccggctcccgtaggtgtacgggggtctggtgtagcgaggttgtctgatctttccgtgtcaaagaagcgggcagcggaagcggccgaattggaagcgagcctcaaggagaaacacggggacgatgacgagagtaatgtactcgggtcgagcaagtttttcgggaccgccaggcgttcaaaagccaacccttctagagctgcacaggagacgctcaggatcatattcgacccttcgtcagcagccggtgacgagctcacagactacacgagtctggtcacggacgacgtggacaaggatactctacctgacctatcatcccctccagccgcctgctcgtccttgcaatcgcctgtcaagtctagccaacaaggctcgcacttttcttctcctggcagagacactgaagaagaggaaaatgtttttgatacgccaaagtcctcgggatcaagccatggcaagaaacggcgatctctcttaccccatagtcccaccaacaattcgacgagcaagaagagaaggctgactgtcaccccgccgagaggtgaaccgattctagcagccgcttcgtcacctggcctcccggaacccaaatcaccagtcagaaagccctcgagggtcgatctgcgaggagtatgcaaggtcgatcagagctcaagtgtgcacgaggagtgggagattcgagctgaagccgccgatgacgaaagattggaggtgaccgatgacgatgaagagcccgacaacaaggcaaacgcccaggctgtcgcgagaggcctcagggcaaagtacgctttcacgccaaaggccagtccatacagaccgacggcgtctcgctacaatacgacgcctgtacccattaggcctctcgtatccaacacactcaccaaccagaaacatcaatcgcgaagctttgataggctagcgccgaccgattctcctgctgcaaaggcttttgccgacgcgaccgctgctttcggtaaaacacctcgaccagcctcgagtcgggcactcagaaatgaagccatgcctggacgtgcgatccatgacaaacacacagccctccgcgttgattcgggagaatccgacgacatcatcgaggatgactcggatgacaaggagcaaacgcctactagggcagtcgcaagagctctcacacgaaaccctcgtcgccggactgaggaacttggagaaaggaaactcagcgggtctgagaagcttctctcgttccggtacggcggatagatcccggtgctatcacgacgatacgaacaaccttgagacgactcgcataatttgcgcgcttgcgtctacagtaacgatatcttgaactaaatttgacgacccagcatacaatccaccaatacgcagttgtaatagcctgaccggggaacgcatgcgtttcccagacgtcttctcgatgcgagcacgattcgaacgagcctttgtatgcttaattttctgatcaagctatggccagctctcaagacactcatacggccatcatgggtaccattctcgttgcgagttttgtgcctcatttcccacttgcaagttgagtcgacgaatgcccggatgcgcgtgagggcatgcgatccgattctcgctctggcaaagccgaagtcggttcttgccattctgatgcagtttatcacacctgatcctgcgcaaagcgcctcttgttgctatgaaggggcatcataactttcatatcaaacaccatcttcaaggcggagaagccttacatgctaattcccggccgatcggagccatgaagacgcatcaagatgattccctttgtcccgcaagctccttgtgcagctatgagccctttaacgttgtttgatctttgtaccgccctctggcaaaaggctaagcggcattgatcgcaaaggtgtcgatggaggtttgcgaaagagtgccggtccgctctagctagctcgataacatgtgaacattgcggtgaacctacctcaccagatgtcatgtagagtatgagtgagggacataaccaaaacgatgaaatgcgcccccccgaacaccgatgggttcaaagacaaatcgttccctgactgactccctcgagtactcgacggtcggagagacgatggaccgatttgggcgaaacttgagaatcgatctttcaatatcacaactctcgatctatcgcgctgataactcctcatcctcaagcgtccgcgcttatgagaacacgcgccgatttcgagatcgggatacgatatcgctctcagaatgccgtacccacccagtggccttgagccatttgcattatcggttaccagagtgacgagcatatcagagggaacaactcgagattcacgaatagatgtgcaaacgatctcgcgttgccttatgacccatgatcagtgaaacgtgacgggatgaaggacaggctgacgatggcgcagatcactcaatgtggaatcgagcaagcgtgaaggtcttcctgatcagtacaagaggtgatatcatcggccccattccaagtgatctactagcttgacaatctcactcgattgcgaccttggctgcgcgtaaagatcatggtcatgactgccgatcaaccaattggataatacacagtggtgcgccgctgtactagactacttgctggaatgacctcaggaaggaggcaggggagccatggcctgcctgatgtgctcgacctacttgacccaactcgatttcgacatcgacatcacatcaagatcagtacccacaccaacatcgacgtatacgcaataatgtcctctgatgaagacaaacccattgaagtgtttggaacctttgagcaattattttcaggccgtacgtttgcctaggtactgtgccgttacaaaaagttcctggttgtcgtctgatgtgacacaggtttatctcgatcaagtgggatcaggcgaggatgccggctcgtggttccgtatctttttgaaggaagaagtgggcaagtcaattgtatggcctgtcagcctacagcgacaagaccgtttggggaaggtatgtagggaccttaccaccttccaccagtcattgtatcctgcatatgcagacatggcgctgtcgggagagggtttccttagaacagcgactcgcccacttcatgctatcatcggtcgaaaaatccgcctggacacaatcagaggccgataaaggcacgcctcaggacaaggtcgaccgcgttggggaggacatcgagctcatcgcttctttgcgcaactcatacgacccttcaacagcttacatgaggtacagcaccttgacggctctttgctgagatctaatatgtctcgccaaatacttctccacaatccccccagtccagcttaccaagcttcacaacaatctctacaagtacatctcctcccagtcgtaacgcaagaagaattaaatgaccgatcacccacttcatgcctttctgggtcaaaaaatccgcctaccgacgcagcaagccatgacgaagtgttttatgagcgaaatggacacttggataaaacggtttgtaattggtgcttctggtaacttgtgggctcttgaccatgtccgccaactacaagcttgtgctcatagtcagaggagagggaattaaggacggaattcactgcttagccatcttcctgtgagccattgcgagcatgtttgacagccaggtggggttcgacttgtcttgtgcaccgcttgtctggatgtcgtcccccacctctgcggcggctggtgaatatcctccaagtagaacataatcctgcatatctttggacaaaccttcgaaaggtcaccgctcgtcctgtatgtatctccggagtcctcaaaaggcagaggttccgatttcccgagacacgagggaagggggaaaaaaaggcgttaaaaaaactcgcaaaaagatagcgcagtgccgggatcgaaccgacgacacccagattacaatcaattgtgttgtgtaaacagaccatcgaagtctgatggactaccactgtcccaaccgcgctcagatgttggggttcgatgtattaaaatatcaaagtagatggtcagttggatcatgcggtgcgggaatgatttcctcgttatcaagatgcttattggcaatctgccccgtgacgtgtctttcagcgagctcgtccgtcttctccatcaacccaataatgttctccctaggtgtctgccattcatcttattcaattcgcaactcatagcccttgtacctcgcactcgcaggttagacatccgtccgtggcacagtcaaaacaacttgagaatctacagatatgagtgtgagtccatgtgtttgaaagctcgccattctgccgctcacattctcgacgtaggccggtttcggttacaacaacggcccaagccgatgcaacgccttcttcaccgagttcatgaaggtctgttcggtctaaccataccaattctcactgccaagctgctggctcacccggtcatctatattccggccgttcttagtgctacgctggtgcggaagatcctcaagagtgtgtcctgacgaaggaggattacttggagtgtctgcataggaccaaagaggtgagcgtctggcccagggttgacagtcggactgggatttcggttcgattcgagggtagcttgtgggactccgcttcgagtgatcacgatgctggcagtacaaggaggacaagacagtaccagtaaccgagtcctgcaaagggacttcgaggacgaatcggatcgcgcccattacggcctgaccagggttgcaactatgagtggccagtggcctcgcacctggccagagcttcagcatcaagattggattattgaaaaaaataacgttactcgaccgggagctccagtctcgagacatgcccaacacggagcgagataaacggcccgatcttcgagcgaaacctgaatgacggtgctcggccaatcgtccaatccaccatccggccttgaattgcttcctcacggccgcgggaccgtccaggacagctatacagggacttgctgcccgggaaagaggtggactggagagagatgaggagagatgcgagtctcgatggaaggcagtccgaatggatcctcgaaaacgggggaacgctgaacaccgcaagcagccgagcgggaagaccttcgaaccgccgctatattctctcgtctaccagctggattcccgttgcagacgacccgtagctgacccgactcaaaacaccttttattacgtacagatcgcccgagccaagcagatcaagtcgcacttcctgcaaaagactgctactgagcattccgacgcacgcaaggccaacgaggagagcgccaagggggtcattgtcagcctgggattgatcaagggtgaagagggcgaggacaagtagatccgtgaagtataagctgtaacatggatgagatgtgagcgaacagagatggctgggaaaacatagaccaacagatacgcgaagggatcgctcggtgagatgaagagctgtcttcgtttctcgaccatcgtagtcgtccttgagcagaataccagcagcgtcggtgaggggctgtggagtcgattcacattggttcggcagtgattcagaaatgggagatggaaggaggctgtacgatgcaatacggtgactcggaatgatgtattttgaaaggtcacgggtaaaatcgacgaggcgaccggggtttggccaaatgaaatgttcgataggcgggacagggtatgttaggtctatggtagtacatatgtcgcactgctgttaggatctgagtgcagagacactcgtctcaagtcttatctcgacaaggtcccgtcccaccacgtctccgcagggcccctgctcaacatgtccaccggctcgggctcgtcatcagaattctcctgcacatccactggctctcttctagctcgtctccggcgcctcctctcggcggcttctccaggggacatatctaacgatcgcccgatctgattgtcatcgtcctcgatcgtatcatgaccaggtaaccccatagcgctctgaaagctctcgtctgctccctcgggaatgtgcgagagaatcgaaccggagcgagaggatgaggtgtagtattgctccgctaccggttcttcgaacggtctgaaagcgggactaggcggtgtagccgggcgttttgcaccctgcacggaagatgatcaagggtcagacccggttgctagcattaatccgcactcagtctgactaaccgccatgcctgtcgggatctctgtcttttcttcttcctcaagcatgcctacccacagaccctggttgttgtgaccgactcgcgagtgcaagccaaaatcgttccacatagtcttcgtcgatttcaatgacgaagtgcctgcgatcatgatatggcgggctcacatcagcccagagtcatagaagcgaggatgtaaatacgtacccattccgaggcgtccaagtaggtctcggactcccacgccattcctgcctcgcattctactcagagatacccgggtactactcgttgtcgccggatgagataggtgtatcggtcgaccaaaggggtacgatgggtgtgatttcgatggcaaggtggctgcgagttttgggtttgactgtcagccagcgcaaaagcatcgatgagaggctgccagtctcgacgaactgtcatcgacatcgtgctgtggcggctcaaaatcatacggcacttcgattgctacaaaacggtcgggttcaggttgattagcttgtcaaaccccgcagaagcgagtaggagccgtaccctcatcgaatccagtcatctttccaaagtcttgttcctcgtcctcgaaagcgaattctagcatgcggatggccgcatcagagcaatgcaagtgggagtaccggttatcctgtcgttgagaaatcagtattaggtgctgcttgccttcgctcagccgacgtgttgctctcactgtcatcgtgttggcagccagagagactatggggatccagtcttgctaccgatccagccacctagctttgcttcgcaagatggtccgttctaggatgtcggaggatgtacaacacgatcaaaacattcgactttggagcgttttgggttcaagccaagctcttttgtttacgaagtcacttcggccacgagcgaaggtcgggcagtcctccgtttgacatggacgtcttccgctatcgaccgccagcattttcaccacctgccctgctggtcgaaggggcatggcttgcgcatagccaggatgcgaaatgttcacgttccttttggtatatcgatattaaaattctgacaattgagacgagatagaacagagagaatggtttccaccaggtacaggcaagaaggcaaagtgccgatcatcctagaatataattcgcacctcaagactggttagagtcgacagccatgagtgagccgacaaaagtcaagatctgtacgagaacgggcgacaaatgagccaagatagacgagacgaaattgatgcccttctacgactcaccaatcgaggtcgaacgtcgacgatatctacgaaacggtcacacgatcagctagaaattccgaaacacgttggctatgcacttaccctcgggaaccaagaagatcagggcgttcaactttctcgcgatcgaaatggccagcttggctgtgacgaaaaaagtcattatcagcgaccgggccatggtaccgcagcatcgctccccgccgtgactgaccgttagagcgcttttcctcgtcgttcctaccttgggtaaccaacgcatagtcgacataaccaggcttgatagcgttgagcaggtcgaggaagaagacggcgttgctcaggctggaatccttgaacgacttcatcgtgctagatttcccgcccgacttgaccttttcgttggcccatctgaccatctccatgtcagttacgcctcgaccgttcttgctcagggaagccaaggtttggttgatcgacagcctgcaagatgacatgcgtgagatgatgtggttgtggttgtggacacaaccaagagtgtattcacctcatcaattgccaaaccagacccagcaccaacgtcttggttccatcgacgatatcactgccctggataccgaccatgtgcatcttgttggccgtggccagctcgacggcataattggtgttttcgaccgccttgaatcgcgacagctcttgtccctccttgggcttggacacgcgacgccagatgacgctacctgggatgaccttgtcgaatccttgcaggaggatactaccgtccttgagatcctcgaacaagttgtacacgcccgggtcgacgtcgagactgttcagccagagcgtgaatacccgcgcctctcgttcgccctcggcgtcaaagtcctcgatctcgggtgcgggaacatcttcgagcggctcgagaccggggtgggtgttgaagaggtgagcgacgaatgccaagttcagcttggggtttcccgagacgagcgagttgggggtgaggaaacgacgacagttgatcttgtcggcattctggaggacctgttcggcccgttgatgcaggtccgaagtttgcaatgcagagcgggagcagttttcgggagagagttggttcaaaagcacggtatagttttcaccgtccgacacgtcctttgaaaagttggcaacactgttacgacgggtcccgagtatcagttgctgttatcgcattggctatctaccatcagcgcaaactcaccgcctctgccatccggcagccttcaggtggaagttgaaccacctcaacaagatctgatcaggcggcaacctcaagaactcttccagcgtctccccatcatccaacagccggtacaattcggggtgatgcttgatgtcgatcttgctcaagagaccacgcctgatgatctgccagatcagcccgaggatcaagtgttcccttccttccgagatgtcctgcgaaccgatgttgacgacggagcatccgatacccttggacgacgtgatgacgatgttgttgttttcggtgatttgaaaggcgttgagtttgcgcttcgaggtggacttgttgagaacccgatcgtcaatggtgtcgggcaccgaatcgttgatcagtttacacaagatcagaccgtctgttcgattgcgcggttgtcagctagatgcgcacagacgcctacagggcatagtctggctggcgtacctcggcattcgtcgaacaactgcatagtgtcggtggggatcggcagcaggtgcccaatgtcggcgtctccagacaatacctacagacgatcaggacagtcagcattcggcaacttcaagcttaactgagggtagtcacccacagcattgatatggtccgtaaaactcctcctctcatcctcgttgatcgtgtgctgcgcgttggtaccttttgtaccttgcaccgcgatctttcccttgaccgcctccatatctccaccagcaccctgcttcaacagcgagtgcaattggacccaatcctcgagctcgaccttgcctgcagcgtcaatattcgtcctcttgagcgcttctcgggccgcatcgtacgaggccgcgttggtggaagtcaggtgctgaagtaccgtagccttgtcaagcttgcccttgtcatcaacgtcaatttggctaacgtttgcaggacggcaatatgtaatgagcctcgttgtgtctgagtattcctgacaatgacgtagcgggactacctacttgaactggttgacgaggctcatgacctcatcctgctgcagcgtggggtactttttcgcgagcttgatcgcctgcatcttgaacgttggcctttcgaggttaagattatgtgtaaaagtgttatctttcaaccgtatggcttgagttgtaccgtctcgattgcaaacaaacttgggtagatacaagtcgattcacctcgagacaccctcatcgatgaacgaacgagaggggatgagatgcgtcatagctgactaggctggcttgatccgacggagatggctgtgccgagagctgagactcgtcgttgaccctcaagacgagcaggacatgacagacaatcaagggatcctatcgccaagtgcttgaacacagactattatgcatccctagccttccatcagatgtcaaccagcaaagacggaacacactcttgtcttctgtcgatagcgaaagtgcctttggagattgccccacagagcgacctcgtccagactttccaatttggaaatctcgtgaggacctcataccttgacacacgaagaagtggtcgggtttatgcaaatcacaaaccgcacgagaaaacaccggcatcaagagtaccctgtcctacgaagtgccgcatagcccactcgttcagccaaaatcgaggcgcaagaccactcagacctcgactcgctgagttcgccgagtcgtgctctcgacagctgtgcatcgagacccagccgacatcctcataggagtctatggcgaaatttgctcgctgtcggcgtatgtgatgtcgttattgttgtacaactggctggatcgcccgaggtccgacgggtgtacaatccacgtccgctcacgaatcgagctagacgtccattatgcctccccagcgggcaggacgaccgtcatactcttgagcttgtcctgcctcatttccttcctgtccttcctgacctccctcctctccgccctcgacgtctgcacgtatcccgtctgcagcttggccttgcgtcccgtctgcaagctctcaaccgcctgctggatctcggcgttcaacgcagaggtatccagcggtgtccatgattctttgagacgcccccggatgacagtttctggaatgaacgaggtggatgcatcgggagtaagggatttacgagcgttcctcgtcggaatcttgggttgacctggacgatagacagtagacgagacaacgtcaactcaaagatccagatggagctcgatcgatactgcaactcaccattccagaataacactccccatgctttaccgtgtggtcgaccgcccgtctgctggaccgtagcttcctcctcggctaatccaccgaaaatatcaccatcctcgttgtcctcgtcgaactcgtcctcctccttgggctgctccttggccttgcctttatccaccacaccggctgctgcgataggttttccagcctcatccacttgctggaagcggagctttgtgcgggtgatcttgtaaaacgagttggggtacttggctttccaggatgtaggctggacgagctgcccatgaccgtatttgggcagaccggccagaagtttagggagagtggttttggcggcagacattctactattgcgtcgttcgatatcgaggagcctagtctgtacaggaccgaaagctttccaccttttacgtctcatagatctcatcaaagttcaagttcgatcgctgaatcccgaggttcaacaactcgctgcgcttgtttgagtgagtgcgcttttgcttgacgcgcgtaaaagtgacgtttcacttgtacaattctttaaagctctgtagctcttggtcattggtatacaactcgtagtctccattcaaacgatgctctccccggtcggcttgtcatccgtgaactatgatgcaggccgagatggcgtaagcttcggacgtgattggaggatgagcggataggaatcctcaccgctgctttggctcgtttacaatggtcgccctcgatcgcctcgtctatcgcaaagcagatgaacagggcatccgacctatggatccagaagacatcagtccagaacccttttgtgtgctgatgagactcacgcgtctccgagtacaccggcacacgcccgaacggcaaaaaagggaacaccaccacacaataacgcagccaaaggtgcgtgactggccgctgatagtgcatgagcggcgtaaagatagcctataaccgccgtagcaagggcgatcgttgtggaggagagggtcaagagcagcttgatcaaggtgtctacgtcgagtggagacggatcagcttccttcacgtgaatcacaaaatcgtctagactgacaatctaacaacttcgagcctttacgacgtccagccagaccgatcgctcgcttagcacttggccagaatgcttctcccgtgactcccacgtaaatcaaggcgtagccattaacgtagtccagcaggcccgagaggacgacgatgacaggatagatgatagagaccagatcgaccggtatcgggataacacgagatctagaatgtaatgcctggtacggtcaaatggtcagcgttgacgaaacgtagcaatgacatacgaccgcgactcactctgcgaagttcgatcgcaacacggccaagaaagcgcatcaccgcaacgatcagggagctcaaacagatcgatccgaggttgggacccgttgctcgatgtatggccgcaactgtcagatccagtgcaacaggcggatcccggtcgttcctacagtggcattcagcgatgataagctgatgtatcgttgcgtgaaatcgggaatacataccggtggaaataccactcgctgatgacagcggcagcaactacccgtccgattcccttgatgacgacccacgtccaaagccagagaagagagacgaccacgattaaaacatccgcataaggcttgacatgccatacgtaggtattttcgcggctatacagtcgtagagtctggtcagcgaaagagttggctcgaaaagccccactctccacttacggatgacgatagtacccgatgagcagcaagcggagaagcaacgcaaggtacggtatggagattatcgcgaataccatgagaagtgctggcgtgagcaaaagcactggagggtgatccaatagaaaggatgaggcaagctgattgcaggcaatagagagtctagtgaatcctggcgcttgccatgtccggccacgacactcacctcgaccaccgcaactgtctgctcgagcctctttcttcgcttccacaccatccgcccaaacagaacggccaacacgaacggtaccaaggcgaacaggcgaagacccgtcgaactccaccagcgtccgccgggatcggccggaccaccaatattgctatcgtcttcgaaggacgcgataaaggcccaccacgagatgacgcagagcgtgaaaggtatcaccacagctgtcgcctgccacgcaaagctatgatcaatacggctatcgcacattgccagtagttacactcaccaccagtacatggcgcactgtcttccggagcagcaacaggaagcccagaggcgctgcgatagctaccaacaccagtaccgagagcagcgggatcatgtgtagaagtgtcgagaacggggttcgatacctcgcagaaggctctggtaggtcagacgccggcatcgatgtgggctgttaaaggcttagctatcagtggaagagtttggtcaggctaacatactgtacccacatcggttgcaccccatacgaaacacaaggctatcactaccgcgacgatactgaacaaccacaaggcaagccacagtggatctgatgatgagggaaccgcgaaagcagaggaattaatcgtggctgcgggtcctgatagatgcatcagcatacttgccgttgtattttgccatcgtctctcttccatttgcccagtaccccatcttgtccggcagcacctccagcctcggtggcaactcgactccctcgactccgagcgcgatcgggtctcgtaatctcctcggctcgtcatatccagcgtcagacccgtcatcctcgtccccagacgaccccatatcgtcgtcctcataggaaccgtcggtaaagctgcctgtggaagaagaatccatggagctcctccttccagacctagaaggtccatctttgactcttgtatccccgcgaaactgccgatgtaccgcctctggtgagcttgtatcttccagcttcccgtcattcgtcatcggggaaggagtcaagcccgacgcttccagcggtgactgtgcacgagcactggatggaaagatgctctgatgagccaaccaacccctcctgattgtagggctcgtgttgatttcggtattgccttcggaattgtcacgtgtcggctcggctacggtggctctgcctttccctttcttatctgcgagtggtgctacgtgagaggcgagtatggacgggttgatcgtaggaacgctcccctctatgacaatacggatgaacggattaagttgaccagagctatcaaatcgtttcaggggcctacgtaccatcatcttctggtgcttcgaacaggagtgccgaggcggaaggaagggtgtcctcggaagcttccaattgaggcagagaccctgtggaggacgatgctagatgtcggtgatcgtgacggaaggaagccggagacatcgagctcgaggatgcggcataaggatctggcatatcggtgcggaaaagctggagagcgatgtaggcatgagcgtctgcgtgacatacagcaaggataccagatgaggcgttgctatctcaccggagcgtctgtatcgtcgtcctgggtacgccgtcccagtacactcatcttggaccagtctggcatctcggcctatgattcaatggtcgacccttcgagttcgattgaatctgtcggataccggtctcactggctcggcaaggtgatgaaggaggcaaagacctatgcctaacccggctacgtccatgcgatgaggccaggcccggcttgctcgatccagtgtgcttgtttcggtcagtgttgtaagctatgtcagcatatgctgagaacttatgaactgacagagactcgtctgactggcgttggtggagatgactttgcctacgaccctacatatgcccgtagtagtgagggtcgatgatatccgtttcgagccgatgtcggcttcgagcgagaggtcaggcgataagattacgtgagactagcgctgaagtagcatagtcatataacttgccaaaaagtcgccgacatcggcagggttcgatgcaaacgtataacgcactcgccttttactagtgcgctccgtgtattatgccctgatgccgagttcgtatttctttctccgccaagcggaattttactctttttgcgcgcgcgaagtgcgatcatcacggtctgctgtttcagtgtgaaccgctgcatctctacctgtatcagctttttgggtttcagactgactctcatgacatcaatcgtttgggcaagccggcaccaagagtcgtgtgatggtacagaagatctctttaggccacgttcacgttgacggttcgattttcgtcgcttcacgtttatgtagccactttaccgaagaagatcaagcaaggtcgcggccctccaagtcaacaatcctccccgttgaggtgagcctacacggaaggtgaatcgtcacaatgctgactttgtgatggtctacaggaaatcgatgcgtacttgccaccctgcttgatacacggtagtagagatccaagtcaagacgaggggtgtgtagtcaaatgttaaagttcataattttacagcgaggtcgtgcatcgctggaggcatagtccagcgtttcaactatcgtggacccagttggtggtatcgatgtctcggtgttttgctggtctgcatcacaaggcgcacaaccgaaaaagccgtatatttgctgcattagccttgtaattgtgttctcatgtctgccgacgcaggacacgtttgaagtggatgtactactttgtaacccgatcgacatgttcgttcagtcctgcattcggttgccctataagacccatggcataggattccagggccagctgatagatcccaatcgagcccgcccccttaactaaccagccaccgcatcttgtttcgtcagtaagtgttcggccatcgtcagtgccgcttcttgatcctctcacacggtctcatgagtacttcagtcgatttacgcaaactttgaaacatgcgatcatcctgaacctgagaagcgactagcagctcccactgacgagatgctggtgcagctactaaaaatcgatcaatcagaatgccgtgatagaccgaaaatgagatacccacgagaagcggtatgttgcagcgcatgtcgaccgtcgtggaggtaggaatgcaatggaacagatgtgcttgccaatacctggtcgacttgaaggatgaaaccgagaataatctctgctagagcagtcatcgccatccaagctcataccgggtacagtcgatgcaatgccctcgatcaccgtcatgttcacccctgactcgtaccgagatgaacgaagctgttcatcttaccacttaaggatttcggtcgccgttgcccgttctcagacccatgccatgatccgctcggcccgtacatatcgacgtgcgggttctttgttatattcattgtcatagtcgctattatccctccgactccttcttgtgtcctcgtatccttgcgactccccgtccctatcatcgatgcatctcatctcatgcatctcatcgtctcctctggtctggtcagtcaatcaagatggccgaccccgcgcggggcatgtatggacgaataaccaagcagacgtccgcgcatgtaagcaagcaagcatataagtaaaccgatctaacccagtctttcatacatagcaacttcaccccatttcacaccgacctaccagagaacagaaacagcaacaggtatcgagacgagacccagacgacgcattgactgtgtttgtattggcccacatgaaacgaccgcacgaatgtcatagtagtatcgctcgtcgaataagctcggcgcggaatcggcctcgaaagaccaacatgatcagatcccaattcgaccagtcggtccagtcggggtcatgatcgacaaatggtcattattggttcatcatcaacaatcatcatcatcatcatcatcatcatcacaaaagcgaagactacccgatcgatcggaaaaagaagcatccctcgaaagcgcctgtcctgcccgtctgtactcgagagtgctctcagtagtgttgcattcaacccgtgtcatttgaagattggaagacaaaaacatattacaccgggaacaaagacgacaagatgacgacgggttgattcatgcaaacttgggaaagggagagagagacgtgcccgaggggaccgaaagttggcaaacgtccgaatagaggtgaatatatataaaaagatgggtggggagcgaagagcgaatattgggtgcgacggggtgcggagtgtggtcggggtcgattggcgggcctggccagggtccgatcgtcgatctcgaggatgggcgatgagggtagtgggggtggtcaagccgtttactaatcgagtcgagggcaagggtaagcgacgagacaaggaagaggtagactcgaagtgaaagtgaacgtacgacttcttgcgagacctgggtcttcttcgactttccagtcttgacgggcaagagctcggcgtggatcgaaggaaggacacctccctgggagatggtaactcctccgactaagacaagagatggacgaccgtggagggtaagtaaacgatgccgatcaacgtctcgtatcaagctagacgtacgaagcttgttcaactcctcgtcgttcctgatggccaattgcaagtgtcggggaatgatacgcgacttcttgttgtcacgggcggcgttaccggccaactcgagaatctcggcagagaggtactccaagacggcggcgaggtagacgggggcaccggcaccgatacgctctaaaggtgggcgggaaaggtcgggagttagcgacgagtatggttaatagacaggccgagggtggacaaggcactcacgagcgtagtttccctttcggaggagacggtggatacgaccgacggggaattggagaccggccttggaggatcgcgaggtcgacttggaagcggcaccttcgccggattgagctttgccacctttgccagacattgtaagagtgagttggttggttggttggtaggtggtggtagagaaggtgaaagtagtgagatgaaaatggatcgagtgcgtttgtgaggaaaagactttgaattcggggttgaatgatgaagtgcgatgatgatgtgtgggttagctatatacctagagttgggggggagtgtgggctgtgacgcgagaaagacgcgtcgtcaaaggggcggaagcgttccagccacctcccctcgactgaccctgctgctctccccatccggattctcgcgagtggctgacgggctcttcgtccctctccccaccctcatctccaccgcccatggccttcaacctggccagcttgatcttcctcgccttttccctctcttcatccaccttgccctgttccttcagcctcctctccttttcctcacggcctttacgacgacgttcttgttccttttccatggccgcctgatccgctttggccgcctgagcggcgtacatctcggcatccctcgtttgagcttcagatcgggcgagggcttcagcgtttacgagacgcatgcgggccatcttttcctcgagctcggcttcggaaagcttttcctggaggtccggaaagagagagggagagagaggatgatcagcgaggcctagtatatgcgtatatagccatgataccactcactcgtttagtaggcgggggcgggacgtagcctcgaggttcccggttaacgggcacattggcagccttgacctgcttgttgtctccttctgtgccggcaatggagccttccccagccgttgctgcagtactctcagagaccggagtcgagggcgagctgaccggggtctggcctcgaggtcgagccgatgaaggggttcgaccggaaggaccccctcctcgaccgccgaaagatggggttcggggtacggaaccgtctccaccctgacgatgaccgccacggggggatgagttgttcaaggaagaccgaggtgtgcgaccgggtttcgatccgtccttgctctgaaagataaaggtggccgcagtcgggttgagttttttcggagacgccgtgtcattcgattcgggcgaggggctcgaggtcgaggtggcgaccgcatcaggttcagcctcgccctctttcttggcaaatccatatccatcctttttatcatccaggctatcctcacagtaagagttgcccgaggcgtcgttgcccgtagcggggaggacatgatcggtcgtcaaggtctgggtcgtgtcattgtcgtccgactgcttgaacggtttcgagggggtcgacgtgtcagacatttcgctttgctcaggcgataattttgccgtgctcaactacaatgcgatcttgtgagcagcagttcaaggcatatgaatggcgatgtcggtagatgtagggtggtaggtcgagtcgattttggaatgatgagatctgaagatgggtggatgatgacgacgcgcaagagcctcaaagctgaagctgaaggtggacaacatccgactttatcgtattctatatgacattgaatcgattcttccccccacagattgatagccagcgagccaagtgccaacgaagctcgttcctaactctacccaggtcacaattcgcagcgatggaggccctcgacacgctatctatggcacctccgggctcaatgtccctcgctacccaggtcggaggtcacggcggcgtgatgagcgatgcgagcggtagcatcgttatgaaagtacgtcccctgcttcaccagcatacttcctgcggcctgtacaagctctgattcaggtgtatcacagccggcgactactcgagagatcgctttctaccagctcctatcgtcggcgcccaacccggctcgtccaacggcctttactagcgatcaagcggaagctcaacaagggtcgacgacgaaatacgaccgactgtctcaaaggcaattgctaggagaactgaaacggttcttgccccgattctatgggaccctacgattggaaggacaagtgggcaaggaaggtggagtgacacccgtcggagagacccccgaggtacgtcgtcccaaccccttcctttgcgtcgcattttacccgcctaacctgagaatgacttgccatccttacagtccatcgtcttgcaaaacctatctgctccctacgtccacccttgtatcctggatatcaagctcgggacggtcctctacgaccgagacgccagcgaagagaagaaggctcgaatggagaaacgtgccaaggaggggacgagctttgaaacgggcgtgaggatgaccgggtttcaggtgagcccaaactcatctccttactacttgtgggtgtaagattaggactgacgacccggatcgatgtcttttttgagcagaattgggacttcgtggctggggagatgatcgtcacggacaaggcgtacggatacgcattgactgtcgaccgattgccagaagggtttgccaaattcttccctctcctcggacagagcgggaagagcgagacgagccatccggctcaggagggaggacttgaaccggccgtgcaagaggcgcacgtttctatcgaggctgggtcttccgccgtcccgccaggatcgacgccgatggacgctcacgtcgctaccggctcatcaggatcgacggagacgtaccgccagtcgctcatccgggtactcaaggcactgcaccgcagcgtctcggatttgtacgccctgctcgaccgtctcgagatcaggtttatcggcgcttccctgttgatcgtgtacgagggcgaccctcaagcgctcgaggcggcctggaagatcgttgacgacgaaggtcgagggaggggggacgggctggacgagtttggacctgatttgagcggggacgagagtgatagcgcttcggaggacgagggggcgaatagggagggcatggccgtggatggctcacccgtgggcaaggtctcaaagcctgggttctttagcggtctgatcggtggattcggggcagagaaaaaggacgggtcgacagggttcggattgctggacaagagtccacctcgacgtcgccacgcggcaagggcaggaccgacccctgatcacggacgtaacgacacggacgacgaagatgtcgacgaagaacacgatgcggatgaagaggaggacgaacatcgaccgagaccgttcaccgcgagaatcatcgatttcgcgcatacccggttggtccaaggagagggtagggacgaggggttcttgaagggtttgaaatcggtgttggacttgattcagggtagactgaatgagctggagaagcagcagcagtagacggaaatgccctcgaacgacactcgatcctggtttacccttacatttaacgatcctcccacgtagcgcctttttccgtgtatgcacttcaacggggtcggccctgttcgtcctcttatgtatcttatctgtatacctcgagtctgtcccttcttccgtgaccgaagtcgacgctctaattggctgccttgatattgtggtcaccgcgacgtgtttcatgttgatcaaggggtaagggaaacaacaaaatattaccccgcggatgcagaaagtcgtgattcattccatcatcgttcccatctcatcaaccaaaagtcgtacatgtacctcgcacactcaccttatggtgtggtatatggacgacggtgacaagtcgcaacagaacgtttcgttgcagctgatagtgtacaccatgggacagaaattctcatcttggaagaaatcccacaaggagaaaaggatcgctcaagagcgcgaacaggaaatggagaggaagaagaagcagcttcaccagcagtaagcaaggcgaatttttcagggtcctctaagcaacttaccgcgggccaagtcattaatccttgtcttcttcacgtcccggactagcggcgactataccatcggcgacccgactgttcctgacgtcccgaaccccgctcctgccgctccagctcctcctcccatccccgtagcaggagcagcgaccgctgcatcgattgccatgctcagagacctggctccagacccaaacgctcacccggcgaatcacgaggcacacatcttggcgtctcagcgcgacaacgtaccggctggaaacacgactggaagcggggctgctgcgggaggatacccgtacgccgggaccgcggctgggggatacggtctgatgggcggagacttcggaggcggtcatcaggacgatatggatgacgacgtcgggaccggcactggtggcggcgtcggcggcggtatgagcggtgctggtggcatgggtgcaactgcgggtggtgcgggaccgacagtatgacgctcggcttcacgtcaaggtgaggagcgacaacagcctatcgatcgggtttcagcataatccctgatcttctaccgtgctgaacgggactatagtcgataatgccgggaactcatgcaaagcaccttacgatcgcacgctggaagtcatacctacttgtttgcgcgccacttaggcaagccacgcgataaattccatgacattcgtctgcccatatgaatgtacaatggaatgatcgtatagccttgaccgagcttcggatctgggtgacgggatcgttaaagaccgctttggtccttcctttcgcacgacatgcgccttggtcatggcaaagcgcagcaacgtcgccctagtacatggaaaaaggccgaatctcgagcagtgaagcctcgtcaatatgcactacgaacttttcgtttcttggcagtaatcctcaaattcaaaatataggcgtccactgtgatctattgtgatcttttccgtcagcacgcatatctgaaccgtagacaaggctgaattgtgtacgcactcaatagtcagagactgccgcactgcaacgaacaactactcgtacaaatacgaagtcgggaaggacctcaatatactagtacaagccaagcagaactagaagacgcccgatccaatgggtaggccagcaagaagatcgactggtgacgtgtttcatcgaatccccccatctgagggtgagaggactcgcgtttcacagcttcctttgtggaaggtaatatggcgactcgacagggtatatatggaacgcgaatccgagcctattccgtatcaaagtgattttgcgaaggtcataaacagtcccaatctacttgcatgtgcgatctgactgccaccggacatggagacgcgaaaagtggctacgaggggatttacaagttcatgctccaacaagagaatgaattaggtcggcttccgaggcttcaaaagctacgcccaggacgcctggcaagtgctttcgtcttcgacaacagtgatcgggaagaagcaagcctgagagatttatggttcaaaaactgccggaagtacggaatcgaaaggctcatatgtacggtacgaaagcgccgtcatggcaagccacctttcaagatcattggcgttgctggaggcagataccacgcattcgtctgttatctcagcttgccgaacgggaaccactatcgggatcgatttacgactgtgtatcctgatcacgacaaggtgggttattctacgagtacatatcctggcgaacacctttcgccttggtctagtagctacaccaacggaatcgacccgtactgcagtaggagttctagcagtctttccaggccggcgtcgcattacggaccaggctcaaagatggcgtcaagcacttggatggggagttcttcaggatcgaggcggtccttgtactgactgtttctggaaggctcgttccctgaagttgtagtaaataggccgtttgactttgtcgtgaaaggctcataacagctacaacccaatcctacgccctcacttatgctattaccagtgcaggacgtagccgactccccaacctttacggaagtgccagcatctttcttgcacaactagtgggaaagcaattgactctgattgacatgcgcgtgatatgcgcaggcgtatgccttgtccatgtcgactccacgacacaaaccaataagatatggacgaggtctgggttcgacgagactcctagtcgtgcatgttccctgctcgatgggcaaaagattcattatgtcgaccgggttgcctcggtcatagatcatggatgtcgcatgggtccggctttcaagccgaggtctcagactcaacatggattttgcataagaacgcttcgtttcgtaggcgttacaggtatcgtcagattcaggcttcataagaacgatcgcgtgatttgaagcccacacggcggcttcggaccctgtggtctatctagacctagcgctactcccgcttccgctggcagacacgacccggcttcttgaccccgcctgccccggtcccacctcgctcgcgctccctacgctttctttcctgccggtaccattcttttctccggctggactgggcgaagctgcgactttttgcttggtctttgccagactactcgcggtaggtgcatacagcggagacctctcgattgcacgggtcccggtagtctgaggacgaagcggagtgacggcaccagtatgatgaggtctcaacggttgcgtttgagcgggagagggagaggtcgtggagccggtatgtgacggtctcagcggggtaacagtctggccagatggggtgagcgacttgcgagccgtgcgtgggatgccagacggagtcgccggtttcgactgagtctggggagaagatcgggtagaagaggtcggaggagcgctgctcttggtagtccgaccgctcggcgtgatgggtttcgacacaggaaggccgcccgtcctttgcgctctgagaggagtttgagcagtgctcgaggacgtcttgctcggggtagtcgctgctcgcgtctgcctaggcgttgtggtcttggtgcgagcggaggtcttcttggcgggtgattctgaagcggaaggcgcaggtgaagaggtggtagtctcaaccttggtatctcgatccgccttgatttccggcagtacagccgtctccgacacagcttgattaacatcaggtgtggtctttacaagctcgacagcgtccggtaccgcaactgccaagtcggtttcctccggtctgacatcttcatccttcgtgatgtcctgcacgatcggaggatcatctcgctcctgagaccccgaccggacgcctgcagcagactccgccgcatccaagggaccctgttcctctgcgcccttcttttcctgattctcgtccggttcgattgcagctggagcctcgtcaacttggggggtctcgatttccggctcgaccggagtctcatcggaggcgtcctgcctttcctgaacgtcgtccataggtatcgcagtaccgctcaactccgggtcatttcgtgcttcagggagactctgggacggagccggctcgggagggacgagtcccgtgccgatttcgacagcctccgcaggttgatcaatcggtatgttgacggtggattccgcgtcgaggacgggctcgtccttgatttccggctctccctcttccacttcagccggctctcgcttgacacgctccgccgaatcggtctccccagatgcagctttcacctcctccggctcgtccaccagcacctcgatcttgtcaccctgatcctcctctttcccttcgacctttctctgctccggcttgccgaggtccaagtcgatactcccgctctctgaagctcctgaagcccgtctccatcccgctccgttcttctcgaacgaagctgaagaccccgagacggaccggccgggaggcctagtacgttcctgcctttccttttgacgggaggcgaggtccgaagcttgttggaatcgtttgatgaggttatttacctggagaaaagagatcgaggtcgagagatctagttaaggatgaagtctggattgttccctaatcgagacaaacttacagatccttgggatttctcgataggtagaggcctataaggagatgacggactggatgagcaaacacgtcgacctgattgaaaccatcattccgcgctcacatctttcgtcaatttctacgcttcaatgttctcgttaggtatcgtagatgggtgcttccagaagcgggtgtcgtgtattgctcagatgatatcgtgaaggcgaccacggctgatatctaggtctccttgtcgtagtcgagaaaggaaggcgaattaagaggggcaagtccgaaacgtttctgattccgagtccctttagcaggatctctcgtagtcgtaaatcgatgtccactctatttggagatcactgtgtcgatcccttcttgatctggatgtcagaaataaaggagttggtaagattacagtcgcaaggtaaagcgagccatattcacaagtgtgtagtagtccttacctcttttgttttgtcctcttgggctcgacgtccaaccgtttcggtcacctccgatcagcgaagatcgaggtcaggaagaggattctatcggggtgacagttggttgctgcgaggccggctctcgacggtggatgataggggactggcaaaggcaatgacctgctcttgaatccgtagggtaagatagagatgatggtcggtatcgaagtaagatggccaacaagctgcctcaaccaaccaaaaactgggggaggaatgacgaatttcagttgatcaagagccggccggagtcgaatctgagcgcgatcgaggtgaacaagcatctatagatgaggacatacctattgcttgatcatacctccagcttcttcttcctgcctacgtaacttgagaggtcagtcattcagagctctgcaatcgaagtcccagacaactcggctgaaggaacgcctatcgcttcccatcggaattagcctcatccagcatgtcctccttcagacctttccctaagaaaccggtcgtcctcgtcacggcaagtccgatcccactgcgtctccacaagtgatccttccaaacacaatccaaatctaacactatggtttacttgatcgatgacagaacgatgacggccctccttctgcctcgtcgcccaacatttactcgttcgtcaagctcttgcaagaacaactcggctgggacgtccgggtagtcatccccgactgccaaaagagttggcgagttgattctagcataagtaccatgatatagtcgcctgaataaaactcgtaacgatctagggtcggtaaggcgtatgccatcagtgacatcatcgatgggaaatacttttaccctcaaggcgagttctccttgtttgtttctggctagactacaacccggcttatcgtgctacgtttttaatcaacagggcctgatgggatggaaggagagattaccagcgagaagaggcccttgaaggatggcgagacgatggagtggatcttgctgaccggggtaagtggctcgatcgggaccgcaagttcggccacgatcggggcgaggccgactgactcgaaatgttcaaacgtcgtgtagacaccagcgacgtgtgcgaatattgctttacacaacatctaccctggagagattgacctagtcatctccgggcccaaccgtcagtacctccacaagacttgaagaatgtgtgaaatactgacgatgcgactcggtctctgatactgtagacggccgaaactcgtcgtcggcattctgtctctcctccggtaccatcggtgccaccctctcttccaccctctcctcatacccttcaattgccatctcatacggcgtcgtcacccgacccgtccccgctcgatgcttggaattggccaatgagaccgctgttgatgtggtcgaaaagctatggaacgactgggggaacgatgggacgccaaacgctccttggcaatacgcgctgggtggggaggagtccgagggagatcataggatgaggggcaaggtacagctctacaatgtcaacctggccttgattgaaaagtttttggaaaaggagaaccgaaaggtcgtctggacccggatagctcgaaatgggtacggatcgctattcaagacgaaaccgctgtgagtcggctgtatgcagctttattttggtgtgccctggctgagcgagttcggcgtctgaagtgatccaaacgagaaccgatgggatagcgccgctcccaaggacaagaaggagacggtcccctttaataatggggagaactcggccatcacggccaccacgaacgatgaagagaggccctcagcaggcaaagagaacgcccctcagactcagcctccctctggtcaggccgttcgacctgccgggcctggggctctacccgtctctgctggtcaggagggttcggacgacaaggtggccggcaaaggcgcaacgacagaggacgctgcaaggttgaggttcttcttctcgcccgagttgaaacgattgatattcccggaagaggattcgctggaggaaggtaccgactcgtaagtgtctctttggtttacacgcttgaaaccccttaaagtagagattacggtcagcttcgctaagtcggagtctctgttcacctgcatgtagctgggcgctattccacggtgcggtctcggtaacgcctctccaagcaagtttcgccgaagcgcccgaagagtcgttcaggttcggctcggagaaggagacgccccggaccgagtcgggggagatgactggacaatggaagaaatagcgatggagtgggatgctgtatttgagatcgctgaagtgatccaatcatcttgaaacgaagaattttgagactgccttgataatatccccgcatcagcagaggtggagtgtccagagatatcaggaacaagaaacctaagctgtacatagcccggcctactgcaccagcagtgctcaatgagcctggagcagcccgtcatcactcaagtaacatgaactagatgaacgcgagatgtgcgatacccaatacgtatcgaggatcggactcgtcggctattgctcaagcaagaaacagtctatagaaacgaatcgttcgcaatcatcgtctcgaatatgctcacgtacagaacgatgacacgatctttcagtcaaaatcacaacatatcgccgagcggcccagctggctgtctccaagagaatactatagaatcgtacgaccggtccatcccgcgactctcgaaggagcccagactcagacgcagcaaactctttggtgacagctaaggggcacacccgatggaaaagttgctccagaccttatacaagcaaagatcgctgtcttgtctattagcggatgcttattaattctttgcgatgtctgccaaatcgtcttggaagccccagcgaatataacacattgatagttattatagtagcgagaaggcctagtattggcacgtcggatcgggtcgtgccaattgtctcttatctttccaacaccactaagacaaactcctgctcagaacctcgacctcctgctggaaaatttacgacaaaagtcatgtgttcgcttgctaacgagtcccagactatcggacctctatcttcgtggacaaactagtctctgattggcatggggcggcgtcgttgtgtgtcaagccatacaggtcgccgtggcgttgcgcgctagaggccggatatcgttcaaggcacctcatcagatctggccagtggccagtgggtcatcgtctctcaagccgttcgattgacgagggaggcaccagacggaattaccgaagatttacagcccaaagcggattcataacggcatcgcacattctacagcttgtgcacgggttcgacccattgcatcacagcgtcaaaccgaatccatactgagggcaagtggtatgtgataaagtgataagcgtcgtacacatgttacagaccgcgggctccaacatcacgggttgaagacatcatcatcatcctcgctacgctcatctgtccccgcctcatccgagtgatctatctcatcgtgttggtactggtgtacccagtagaggagatgtagtagatcgcctggagagggagttcaggcgatttctccgacgtgtaatagtccaacaacatctttgcaaatttacgttccacaagctgacccgcagccatgtgagcggttttggagactgtagcttgaactctctcagcatcggacgttgcgaccggcctgacggcgctactcaccgggaattcgttgacacgcttcttccagctcgtcgagctcggccatcgctttccagtcgaggcctagaacccccttctccttgaaggccgcctgtagatcgccatcgagacggtttttctgcgccgctgcatcgcagtgagtcacacggcatagttcagcttgtggctcgacttgctagttggcagggcttacatagtcgattggcgatctctttcatatacgacctggcaattggtagcatccttttacaaaagaccttgggatcggtccaaaactaattgtccgtgacaatcgataaacttcgctatgagaatcagtagaatttgcttgttgtacatggcgacacttgcctcgttgtcgccatgtaacactcggctctgctgggtgaaaacgatagtctccgccatttgtttggcgtcaattgcatcgtccctgcaaattggaagggatggatcagcacggtctaagccgtaagtcgcacagctgatgagctcaccaatgcttctcgattagtgccttcacgcctatctcctggccttcttgaagatgagacatggtcttatgtctaggaacggtaagaatcgttgtgtgaaccgtgtaaaggttatataattgctgtttgatatttagacagcaacccgttcatgtccggttcatggaggctcgttgatttccgccctctccatatttacgtctgatccgcgatgtccaatcagccaaatctcatgctgtgttcgtgtttacaacggtagcctgcgcctcctatgccctagtggtgtaagcgactttttcgaaaaaggatagcacagcgcacagcattagccgagcgaaaggtggatttccatctatcggacggtgtgtatgcccgaggaggtgtctctgacggaggacgaccgggagctatatgatgtctcacttggtcgtacggtgtcttttttgagcatgaaacacgacctctcctgcgtcgatcccgttgtcgacatttcagcggtgctgtgcacaagaggattggcgaacgaccgttgtcgatgtactcataagacccaccggatccactacatatctcttttgtagaccgtgcccgcgcgcgtcgtcagtgtttcataaagggtttgaaagcttcgaaacctcccgagcagcacagtaggttgctcatcgttaatcaaggacccctttggtcgagagacatacccctttggccgagagacatacccctttggccgagaaaactacccctttggccgagaaaactacccgaccaaaagaaattcttgtccatcatcacgacagcgggcacgtcacagattcgaagatcgaagaacggacgatggcgacacgtgggacaagtggtcttgagtggcctatatatacaagtttatcaaggcccctgggtacgtattcgaggcgcatcattgccgactgcctgtctttacaacacaggccactcactttctaacactacgcttcaacctagctcgccacttgctgctagagtcgaagtcagcaaaatatgaccattgatcccaacgaacgcgtcgcactcaaccatggagcaaaggcgatcatcgacgcagccgacggagcagaggcaccttccaatctcgctttctctaaaacgctgctcttgatgttcatgcccgaaaaaaatcacagcaaggcggcgttctggacagatccggccgttttcatgacgaagatgatccccttgatcaaccgcttcccagcaatcgaggaaaatatgaagcaagcggtgcagaaggattcccgcttgacatcatatgctggtgcatacggcgtagactttacgacggcggtatcaaccctcggtatgttggcagtccgtatccctttgaacatgtctgatgcagtcatcctcttcatgacaggccccctgatcacggccaacaagatggaccgtgcaggtgtcaagccggagcacttgacggctgcccacttcaggaacgccttgaggaaccactacggcgacgccgagagtcccctccctctccaagcactataccacggagttcccaagatgcttctgcattgaaggtcagccgcgatcctgatcgttcgcttcgaatcgaaccaccagcattctagtctacgcagtatacctcgcagaggagaagctcggtctatcagttcgagccggacctggcttgcaaacatggagaagcgaaggggtgtccatgatggaggatcaaccgattcaggacagaaggaggctggccggcaaaggatttcgcttgtaacgtgtttgttccccgtgtagctctatcgcatgcgtgtcaatccgtctatagctctatagactgtgaagtgtttgtcaatccgtcgctcgtgttatttgctcgcggctgatccgcaaacatgcgtgacccccctttcgcgtgatccaaaagcgagggatttgtgtgtgcgagcgactggtacgcgcgagaatgcgggacgagaggcgatcgaccgatggagtggtcgtgagcttagcagccaggctctttaatatggatcggcttcaagcaaagagacagacgagaccggcacagtggtctttcttgcggtgacatagagccgggctcgcaccccgaagttcgtcgacggatacgtgatccggtcggtcgatagagctaacggccgatcgacagagctcggcgtcaccaggccacatgaacgtcgtccaggctagtcctatatggcagtggctatccttctgccctgacgacgtcgtctggcagaagaggagcgcggagactgggctttatcgcccgtccagctatgcgatccgtacatcagccatggccgatcgacaggccaaatcgaacccgcgacggtcctccgataccgatcgataatggtgtgagcaatgtttatgcatattgtcgtacttgtacagtgatgatgagagtccaatctttgatccgacctcgttcctggtatatctttgttccgtacattgcgtttaccgaggagcttgcttgctggaagacggaacgcacaagcctaacgtcagctttcctatatcagtgcagtcgagcagcctgtaactcactccaacagtgcctttgcttcgttgatctttcctgccaggtatggcgaaccacctcgatcggggtgatttgccaacatcaaccgtcgatgagcatctttgagcttggttgtcgtcagagggtccctgtgaacccaacaagccgggggacaggcatcagtagaggtcgaagccagcaaaacgagcatcttggactgacttgatcccaagcacctgcatagcctcgctcttgtccatctttccctggaaacctcctcgagcaaaggtgctcgccccggcaacggctcctcctcgaagagcttgccagatcacccgacctccgagtccagcgccgagaattccgagaccgatcgtgatgggggtggacatgatgagtctaggttacagagatgaagattgtagccgagattcagggcagtgtcattggatcgaggcaaagatcaaagggctacccgtttacaaagatctggttgctcgagagtacgatgctgccgagggtgatgagcggcgggagaatggcaaaatcacgtgatcgaccatcatgatcatcccaggtagagcatccgaaggacgagctgaattatctcgaacggtctggtctacttgatggcaccccaataccaagcagctcctgccgccttgctgaagaacttcaacgatacacttgcaataatgtctgagatagtacccgatccgaccctcgatcaacctgcgaaaaagcgaaagcgatccggcaaggaacgtcagcagcgaaaggcagaagccatcgccgctatagcagctgcggccgaggcagaagctaccggcaccacgttggaggatgccgcagccgactcggacaacagaccgaatgaagactcagtagaagatgtgcagttgaaacaatcggcggttgccggagagatggatgtcgagcaggaagatgccatcgaggaggagggcgaggtggaacctgctgcagaagtctttgacctggaaaaggttcaaggacgaatcgcaagtcttgattgtggtccgtcggcagtttgcggaagcttgctaatgtctcttgtactcgcagcaacaaggactaaagtcaatgctgcccgtcctcaaacgagccaagacgtcggaaactcaacgtttgataaaaaaagtcaagtttctgcggaaaaaggcggaggacggcggcgatgctgcccagaacgccaaacaggaagtgctcgacctcgaacagcagctcgatatcatcaaggtaggctcttcgctgccacaatatctggcaaattcgctgatgctgaactcgggcgttatagcggctcgaactgagcgcactcgtccagcctcttctctcgctcaaattgcgcaaacacccccggctcaagcaatccttgcctctaccccccgactttttccctgaagccaccaaacctcccgcggcatcgtcgactctgcagatcaaggtcgagaaccggttgtactcgtcgaaacccacgagcgatgcgatcgctgccgtcgtcaactgggtcgttggcgaggacggggctagtctcaagtacgcgcatgacaagggtgccaacgctgccaacaaggccaaaagtgcgaatgcgagcaaatcgaatgctgtgcctaacgtgacgacctcgcacgacgtcgacatggacgttgacgaggatgcagacgatgccggtaatgtcagcgcgctggtacaagacgatcaagcggaagaggagcaggtcgctgtcagcaagatgagagagcaggttgctgccgaggagatggctgccgaagctgcaggatgggaatctggatcgttgtcgggcgacgatgaagaggacgacggggatgatgatagcgcgtcatccgacggggacgacagcgaagattccggggctatcgattgggatgctccagagtgggaaggactacctgcagatgaagacactgctggctcttcacatgaagctcaagtcacacccggtggcaagaccgcgtctaccaccgaagcacccgtcaaggccgctaccaagcagtctgatcttcctaccaagaagaaggaaaaggccgttgaggctgctccggaaaagactaaatctgtccgagcttcgacggccactatcacgtcttccttgttcttgccgtctctgaaaactgggttcacgcttggagagtatgatagcgacccagacgaggacgataggagggataataagcgacagggtctgaacccgaacggtgaacgaaagaacaggagaggtcagcgagagcgacgattgtgagcgtatacaaattcctgtccttgaggtacacatggctgactgttctttccgcacgtgttgctaggatcgctgagaaaaagtacgggtctggagccaaccatgtcaaaaaggccgcccagtctgtcgatggtgcagcgaaatccaaccaggccaggcagttcttacagaatcagggaggccagggtacccaaagtggaggcaaatggagtaaaggcgcggtgggagacaagggctggggaggtcgtcaaccaggatcggcacccgagtctcgaactcgaccagaaccaacagccgcacccactcgacccgctgtaccggccttcaagcctgtggaaaaggtcgcggacaagccactcaaggcggaacatccctcgtgggaggccgcaaggttgcgaaaacaaaaggaagcgcagttggccagtgccgcgttgtccggcaacgggcaggcgaacaagcccaagaagattgttttcgattgagctcattgcgagcgggtcttgtatcatgttggtgggaaggacgtgttgtaatccgagtttcagtcacttgcccgtgcgggatatggaagtgttcccaagatgacatcaggcgctactttgatggcacgctgctaccgaaattttgacttcgtgcgacaggaacagcagggatttgttttttgctgccggggatccgaagagacccgtgcgttggcccgtaacgtgattgctgtttgagagcgattgcaaccagctctgtgacttgtgaccggacaagtctctacgcattgttcgtgcctttgtgaggtacgggtgtcggaataacaaggttacgtggcagtcaaggagacacctaaggaaagtcgccgttcgaaatgcgtgcatcttggggaggccggcttaaactggcggccgagtgacgcgtctacgaactcgatgcgaatccaaggcacgggtacgagcaacaaggtttcgagcctcctagcctctggaacatcggtgagggagcagccgtggtgatttggcagttcactgttgtgaaccgctttgttgttgatacgccaaaaaaacctttcggcaggggagtcatgtcgaccgaggcctgttcggaacgccacagacacgtggtcgcgggcttcttctggtcctgccgtcgcccgcgctctcgactgagcctggttcgctgccgtaagataccgacagggttttgattccgaacagccaaagtgtaaacaaggacatcatcacaacctcgattcatcgcgacgttgccaaacacactgaatcaaagcgttggttatgtgcacttcctcctaggcctgtacatgcccaggctatcagtattagagagttagatataaacgtctcctcgctatacggtagcaagttggacactgccgtggctgctcagcatttgtcaacagcttctacaagtgacagccaccatcaattcttgcaatagacattctgcggaaccgactcttactcccacgacacatagaccatagatttctccgccatcgttcctttcgatagatttgcgttgtctcgctcaaagtccatactacgaaccgttctcccggccttctagacaccgaaataaatctcccgcaaccccagcagaacggcatattggatgatggcgcgaaacctcattcccgagctggaaaagctcaaagacgaatctcagcaggacgatgcctggctaaggagaaagcagtcggacgtaggactcctgaaaagcccgtggcgaagtccaggttggagtaaagaagaggaacggaagggggacaagtccgtgccagaagtgagttagctgtctgcatgtaacaaaagccaatttgtaacggttgatctaatcgaactttgcatccctttagttgacgagaaaactctctgatacggccatgttcccacgaagacctcgagctaccgcaccaaccctcacgctcgcccaactcacctcgtccgcctgctcccccgccctgcctacatcaatatcgccatccccagcatctcgaccttcccgaacacgatctcgaccttccttcaactttgacctcgccgaaagacgcagctctctagattcgcggataccagagcggactcatacacgctgtcaaactacgcctcctcgatatacctcgagcttcctcgcctcgccgtttctgcctacggcacagaccccgggtcagatcggcgaaacttgtccgccacctcgacgaaagcgacccgtctccatctctccggttgatgccgcgttcccactcgccagacctatgcttggtcctcgaggcgtatcggaccctctttcgagccgatctcggccgatttccatggccatccttgaagactcggacgaaggagacgaggccgaggagaacgacacgccatccaaagtgatacaccgtcggcctccttcaacgtccaggacgagggttcgccaatgggtgaaagcgtcagggtctacgatggcgcctgtggctatcgcgaacccgatcgacctggtcgaggctgcggaagacgaggacgtggacatgcactgcgataccgactctatggcgagcggctgcggcgaggtggtcgagacgaggctggcggatgcaaggtctccagcagagccacttgctgcttctatggacagtagtgaaagtcccgacagtatcaacatcagcgttcgaccccaccccgcctcgatcaagaagaacattttcggcaacggtcgacctctgctcttccacgtcgactcgacggcgtccagtcgcacgaccatcactatcgattcgaacggtaccggcggtctaccatcgcctacgcccagccctggacatcgcggagcacttcgcgaagcaaaggccgcagaaaccaagactttcaagcctcccagatcgcccttgtcgcctatgacgaacttgcaaacacaatttctccaaccgaaacgacccgcccatactagggccgccacgagtccgctcgtcaagacgttatcgtggatggacgtggaacatgaccggtctttcgaaatggaccacacggagaaagacggcttcgacctcgacgaattgaatttcgagctcgaaagtgccgaggtggacatggatgcgggatatcgtggagacgacaggtttgatcgtgcaagcggtcttggtgaccaggaagactcgggtcttgccctcgatgcgcatgatccatctttggtcagcatgtggttgcaggaatcgccgtcgtctcgcaggaaagcgccatttggacttaagaagaatctttcgtcgcccgacctcgcgaccagaaccacgaatccatctcaacagcgacatgcaatttctcagccgtttgccagcagtgggtgcgatgcagagtcacccgaccttttcggatccgatggccgagacattcgttcgatcggccttgcaacaaaagactcgcccccttttcaaaggtcgagccccgagtctcccacaccgtcgggattggtctctcctccttgtcatcggggtagcatgttaggggattgcgacatgcagtctccgcgcagaggatcgttagactttgcaccacgcgaaaggaccagtttacaagaaggatctctgatggaccagctgtttcccaaggcaagacaaagttctatcaaccggcctggccttccgaggcgtactacagcaccggccgctgcagggcgcgatgaagaaatgttctttccgcccatcacgctaaagctttcgtctgacaagcgcaagagtctaatgtcaaacagttcttctgcaagccctcgaccttcgcctcctcatttgcctgccggaactcccactcacacctttgaaggtgaaaagcccagtccggccgctttcatgagtacaggcttggtcaagaagggtagtggctcgttcaggtttggccgcagggagcggtccaccacgaatggtcctccgctacctgtcgttgtcaacaagcgtccacctagcctgttcgttgacacgcattacaagatgcctgatactcccatcaaacagtcggctcatgccatcacgaccagcttcatgtccatggagaaacccaaactccgaccattgatgcttccgaacgtgagccaggaacaacacggacctcaccacaaggatcaatggatggcgactgcagcaccgtctgttagcgacgagcaccgacgtgggaagtttagtcagagagggtgggagagaaccgagacttcggacagtatcgtcacagtcatgccaaacgacggaggcgtcagagccaatttgccgcaatcgaggggtttgagaagaaagggaagcgctctctgggcgaggacaacaagtggcaactggagcaacggatcttggtcgaggcagactgcccctggtatcgatgaggaggagcctattacaccgaccaggccatttgaacacgcaggtgagtgacgtcgcggcccactgtagcagaagcatctatactgacatcctcaaccaaacgatcgccagtcacccggctggactttgctggcctcgatacaccttcgcctcctgctccaattcgaacctacccattcgccaacggcggtcacttgcaagcgccacctgtgccatctccatctccacctcgccgcaaggggaccttgctgcagcgtctgcaaggcagcaaacacaaaacccttaggcggatctcgaacccgctactatctgccgcctacaagctgggtgaacagcaagcacaatttggcaaccacatgaagaacctgtcgacggatagctcgaaaccatcaaaacaaggtcgggcgtccctttcgggctcacttcctggcgcaacccgattcgaaaaagattatgtcatgctggaacccatcggtaatggcgaattcagtactgtctggaaggtaaaggagaagaagacgggccagctgtgggctgtgaagcgcggcaagccgtatctaggtctgaaggataggtcagtaccagtagttcctgcgaatgaacacggatactgacgacgagccaccggtgttacaggaagcgccaactcgaagaagtcaaagtgctggagaatcttgctcgccacccgaatccccacgttttgcaattccacggggcatgggaggaaaaagagcaactgcacatccggacgactcttgccgaatgcggcgatttggcctcttacctcaccagcattagcgagactggtggtctggacgaagcgagatgctggaaactcttgtttgaactgactttggtaagttttgcgtatgctcgagatggtcaattagacttgcgaccgacccgccgacataacgacagggtctacgacacgtccattcgttggggatcctgcatctggatctgaagccgggaaacatcctcatcaccgctcaaggcggactgcagatcagcgattttggcttgtcggtcttccaaaacggaagcgacggagatccgaatcgcagtcccagagtagactcccctcgggaaggtgaccgagagtatctcagcccggaagtcctttgcggaaactttggcactgaagcggatgttttcaggcaagtcatctcggcaatgaagctcggtagagttgtgcgctgacgacttgttcaacagtctcggcatcgccttgcttgaagcgagtttcaacatcacccttccatccagtaagtcccgaaaattttccccaataatgaggcgttcctaacaacgctctactatgtttgatagatggcatcgcctggcaaaaactccggtctgatgatttcagcgacttggaagagcacctggacgggtttgccgcccaaccggattttgcctcagctgccgacacctcaattcctctttcaccttcgggcacttccatctcgtccgaaagttcattgtcgtctcttgagatcgacctcgctcctgctagaggccctagccgggagcttctcgtcacaatcaagggcatgatgcgcagcgatcctaccgaccgatggaccctccaggatgtgtgggagtttccggtcattcaacgtcttgttggtatgaactcggctgaacgcagcgcccgcgtatcgatcgaatctgctgcgaggtctagccttgacgactgggaagactggcatcgacaacgaggtcatttcggcatgaatccctcacctgggtcggcgaggatcaatgtacccattgttcaactccgtcgttccgcatcacctgctctggtccctgaagaacccggtttcctcgacgacatacttagatgctggcaacgtatttacatttaacggggcgccctcttggcgctcacgattctccaaactttgcgaaacttcctgttttcataatggattcacaaccaacatgtagccactagtagaatcgaaaccaagtagcgaaatcgtgtaacgaagcgaaacgaaacgagaaaacacatacgacatcaagctgaatagatgcgatttctacctcgctaatcggccttgaccgctacccgttacgtcatcgtcaagacagtcatgcctcgcgagtaacatgtccagactcccgaagctcgatatacttgaagcagttctcgttcttggacatgtcacagcatctcttcgccctcgggtagagtccaaggggcaagaagtctctctcaacggcatataatgacggaatcacgctcctgtgccgacgattgtctggctgtcaagctgcagactggcgaacgcaaaggcacctactttgacctagatctcccagtctccgggaccgtacaaacctactttactgccccccagggccacacaaaggaacaggtagaagctgacaaggccgacaagatcgttttgtggatggccgacatctatggacctcacttcatcaataactgtctgttcatggactggcttgccaaccagggtgagcgggcgtacgcttcattgtcgccgttcacagccctgcgggcgccttcctgacaaacgcctacgtaatacaggatacttggtcatctcacccgactatttctacggcgaacaagtagccgaactcaacaagacgcccggtttcaccctcagcgacttcatcccgaagtggctcgtcaaagtggatgatggacagggcaaccaggtccccaagacgacccaactgctccgggaatggatgccacgggtgaaggagatgtttgggaagcccgatacaaagtacggaatcgtcgggttctgtttcggctgcccctacgtactagactattgtaggtggtcagcgccagcgaagtcgccttgaagccggggctcagacccgcccttgttccttcggcaatcaggcaccactagcgaggtttccgcaggtgagttcagcccagcgggcacgcggacgagcgtctgtttctgacgacaccacctgatccactgcttcggacgatctcaggatccatcatccaccctgcccggtgcgatagtgatgttgttttccacaaactcaaacagccgctttacgcctctttggctggtaagatgcgccgcccacgtcgtcaacgccgtatgcgtattccggttaacggctactaacctgtttgcagaacaagattcgcatttccctccgccgaggagacgcgccctcgaggtcgctctcacgggtcttgcgagccccgaagccccagacggcgacgcccacgatgacgctctggtcggaaccggtgggtacgactaccaaatccacatctattctggcgtaaggcatgggtttgcgctccgggccaacctcgacatcgaaagggtccgatgggcaaaggaacgtaccgcagaaaacttgaagttgtggtgagtgaccaggtctaacttgtcatgggagtcaacgattgccggcggcgggcttaccttgcctgcataccatcgtcattgcaggttcgatcgcttcctcaagtgacgtcgcccatagaacaactgcgtgtagaagacgtggaaggcgtgtatctcatgtcgtagattttggtacacgctgtatcagtatgggcgtacatgcgcgcaaagaccggatggcgagtcgtcccgccatctcatttcgattcgagccattcctgatcaggcagctagcaggcaaagaaaggacgttccgcgacttccggacgccatgccgcttcatcgactgctggatctttcagctgttcacgtctgatgccgtggaatcgccggtcaggcacgcgaatctcggtggcagtgggatcaagggtcagacctcgtccgcctcgtcgatacagttcaaagccatgtcgctgccaccgaagttcaatcgagagatctgtgcctaccaggtcgtcatctcctctctgcgcccgtccgacgtctgccctagaaggtcgggccatttcgtgagatgcagaaatctccgcagaatacgaggtggatcgatgcatagcgtctaggtatatgaggccgcagtctgaaaggtccgtacgcacggacttagcatcccttcgcctccgacaaccatcttttccctccgaacgtgccctttgaaaacgaccagctctgcgagcaacatcacctacactcgttaatcatcccacctttccgctaagcctagtcgacgtagctctggatagcagcttgcttggcctgcctctctttttcctcaaaagctgacaggacgcgagcgcactagtaccgaccacgtgcacgccctgccctaattactcgaacctgaatcgggccaatcccggtggagctagaacccaagtcgatcgcctcttggttacttcagttgggcttaggatcgaaataagcgacactcccgggagtcatggctgccgtgatgagacctcaagaccctatggtctcactcttcgaatcgcccatccatcatccggattcgagtgcttcgtttctttccttctcagcgctggccgactttgaaggatctcaacgggacgagcaacccattcataatacttggcctggagcccaaaactggcagatgggcgacgcacccgcgtatcaacgcatggaggccctggaggctttcgagttgaacgattactattccttggattcgcctcagagctgtctcgccattacaccttcagaacactcggctcaatcttacgtgacgtgcgacgctggatcgatcgctcccgctcaacatcgatcgtcttaccctgatctacaagaggatacgacgtacggcagggccattgttggtcatgatgatcagcacgtattctcctcgggaggtcattccacgatgtctctcaacagcaaggcatcacatgcatcattcgcatcatcagcatctgggcacagtgaatatgtcttgacgcccagacactcgatcgcctcgaatccctacagctggggctcgatgagtcttcctcctggatccccttcgcaatacccagagcagtggacatcatttccggtagccaagtgcgggatgccaaactctcgatcgtcgatctggtcgacggaaagtgctggtcaggctttccccttgactgactatgtcaattttcaaggagaaaccgaggagaacaccttgtactttgagaattctcccattcagcctttgtcgtgccggggtagtttatcctcgatccgacgtcagtccggctcgctgcctcctgtcagcagccgggatctatctgcgacttttagtaataccgtgctcgagatcgagacgcgatctgaaagcggcatcgcgacccctcagcagtcgctgttacctgccgcttcgatagtcggcaacgtacaaggatggcaatccagttcgcccacctacccctcactgctggactatgaggatgcagctacaagtggtaatttcagcgcccatggacatttcggcgagccaatcgcatatccaattgtgcctcgatccgccaaggctggtccttccggactcggggctgcctatttgtcagtgcctcgcggcgctgtagcgagaaggtgagtggagcgcgactttccgccaagtgcagtaaatataggaattaacttgatatcgccacgtagatctcggtcctctgacagcgttgctcgacccatgccggctcggccaaagacgctttttgcgttccatccggtcgctgaatcgccttatcgtggaggtagcccgtatgatccaatcgatgccgctgctcagcagtatccatcacaggtgatctcgtcgggtctttccagccgacgcaatctccacggcctagaggtacagatcccgcttacacctgaggcgggagcgtacggaatgcctgccgcgagcagggcgcgaagccagtccagccgcatgcacacacctgtggcggtcacaccgccacctccatcggtctacgactcgcctggatactcgccttactgtgctcccctatctgcgccaccgatgcctcagtacgcctaccatcacgccgctgcaatctctccatctcccgctgggcctagcctgcagccaagcgtgcttgcctcagctccgggtggcatccaaatcgcacctcctctttccatggtcaattccggactggcccctcctcccggctcaatagagacgaccagaccccgggtcacttccatctcaaatcgggcagcctcttctacagtcttgacgtctgaaccactctgtatgccagaattgaaggaggaggtctgcttatctgccgatactgaggttcgacctatcgccaagcttccagcgagccgcaaagcatcaaattccaaacctcggaaaccaagcacttcaaagcgaaagatctccgagacgggcgtttcctttggcgatttcatcaattatactcccaaggatgctgccgttatttcagccggcgtcgccccaagcggcagcaaggcaaagagacgatcggaagatgagggggaccaatgcaacaagcgggtgcgatcgtcagaatcggcgtgattatcgttttgcctctgtcagcgatgtttgatattctgctcctatactgtagcctccttggcgtgtcctttccttgccttgatgtaaacgccacgcggcacgtcgttccactcgtatctcataatgctttcatagtatgtcggattgactatacatgcgttcgtcacttgtgatctgggccacatgtcatactccaatcatgccccaaggtatctatcaccgaatgctccacagtctagaccacgagcagtcgaatcagcttcgtcgctcaatcgcgctgttgggggacgtacctgggactacaatccaagctttcttcttagtctctttgggggtatcggaagagcgtcggtggaattgtagacgcttgaaggcctcttggagatggtgggacccgcccgtcacatcggtgttcgcaacttcttcttcctcttcgaccgggctactcgttccaggcgcatgttcaggcagcgagaaagtccactcctcgatatcatgccccttagctgcggcaacaatcctgacagccgggaaagctttatacacggcagctaaaccctgaggggcaaccagatacgtcaaaaagacgatgtgacgttctagtgagggcgcaaccgaaacaatcaacgtcgatcaagaatgtccagcaaaaagttcactgatcttaccttgtatgccgtggtctagcaagacccgaatagccatgatagcggctgcaccggttgagatttgggcgtccataaggaagacaaccgtatcttctgcggtgtcactcttcacgcagtcgggaagtgacgtatgaaacagcaaaggttcccccgtggagttgtcgctctgaatcaagagcgctccaatgcgtacatccctaattaccctcctcaatcccttgacaaaaggtccaccgctatagatttccggatgtatcagccaaggcagttcctcagccgatctaaaacaagggctcacgatcgttgaatacagacaccgacgacggactatcggaaaaatcgagaccgcataagcgcgaagacgttactgaacacagaccgtgactatccaccttctgtaacatggtcattccagacgcggctacaccgagaggggtggtgaccttgacagagccatattcgagcattcccaaagcttcctcgaccaccagtgacgacaaccggtctatgaatggcgcaatatgcttcggtgagttttaagtcgtcacaggaccatcccagacacggcactcaccgacgtaaaagatgaattccgagcgcggtgttgatgcatctcgcaagatggtcatgattcccttgcgaatcgattggtcaggaaagtttcgaagagggatcaacccgcccgtaacttacttgaagttgattggtctgtttaagcagcgtaaagaacggttcctgttcttccggtatggcgttctcctgtgcggtgggttgcctcgatcgaggagcattttgctccatcaacttgcttcggaacctcagagatcgagcgtcgatctctcgttgtacgtgggcggcaagcaagaccttggcggtatcgttatcttgaccgggtacaatgatatccgcatgcttggaggagggcaaaacgaatgtatcgtaactgcgcttgacgaatcggaggtattgagcgatgattccgtcaacatcacggccccgttccttggtatctctgagaattcgcctcgagagcatgacatcagagtcggcattctagcgatgctaggttcagttctcggggcaaccgagtatgatcgacgttgttcaagtagcttacgacgaagatcttcaagtcgtacaggtcgcgtagctcgggcgaacataatgtcaagataccctcaactgtgaaaggagaccagtcagcttccttgagcctagttttgggttcctctaatgctgaccgatgatgacgcttgctccatagaggtactttgtctcttcaagacgttgatgctcatcgaagctgtagacggggcagttcacagcctttccctctttgagatcccgcacgcactgcaatattcggccctccagtcagtaccggctcgtccagtatggcgatgcactatctacatgcctgtgcaaacagcttcatgtcaatagcgtccggagcatcgaaatccagctcgttcctgtgtgccatagcgttcttctcggcatcgagcttgttatagaacgagtcttgtgacaggatcaggcatgtcgggatatggttgagctgcctcaggatagaagtagcgacgtgcgtctttccactggcgcttcctcctgcgataccgatgacatagctcgggacagctttacccagttgattataccaagggggacgacccttggagctgagcaagacttcgtctttccgtacgacttcgtgtggcatggcagctagtgctagattcggagagtgcagaatccttggagtacctggtcaggtaagattgtcccagctcgcaacaagaaagacaaggtcagataagcgatgctgaacaacctgttgcccgtcgagattgagcgtgcaatcttccctgtgatacgcaagtttgagttgagtggatgccccggatttgagcgagaatcacttttacgtaattttcggtcgcttagtgaaggaggtcacctgcaggttcacgactatttacaagggtaaaaggagcgcttccctggcagcccccgtgtcatgatgagaacaagattgtaagagcgacatgctcaatagaccacgtcctctgaagaagaagcccgacgcggaactccacatctatgagttccgaagtgcatgtagtcgtacgtaggcctcatctagccaccatctatttgtgtccgtttctctccctccacttctttacccccttgttatatgttgccttattcactccgtgcgtcaccagcatcatcgtcacactttcgaagagcgaaagtcaggtcagtcagatgcgcgatgcacatgccccagcacccgctcaccctaaactctcgacctcgaagttacgtgactcgtcatcaaagaacaactgttacgaggtgttagattgcagatcacgaagcgtcgacttgttaattagccttaccatttcggaataggggatccccgtcttcttgtgaatctctgtgttgccaaggccgcttgtcagctcaggtaatcttcctcgataaagagagagagagcacatacccttgaagtgcttgagcttggaccctacatcagaaatgattggtgcgcccagtaatcagcgacacgaaagtgatatctatgggagctcagcatcaagggagaatgactgaccagggtagatttccatctgacggtcggtgtcacgggggaattgagccaatagtcctcgcgaatcgaccggtcagacactcacagtgttgaaatacgtgatagccttctctccgtttggcatcaacaacagccgcaatgcctccctcgcgctgaaaacaagaaggattcgatcagcgtgccgtttccccatccgattccatcgacaatcgtcatttgggtatgattacgagcctcatctagactcacaggtccggagcgcacgtccgagatgccgctgccacgtggatgttggtatccttcaacgtttgcaatatcccaggaacctcgtcgtagaagcttagtttcgtcccgtgcctatacagaagcccggtcagtaatagacatctgtcagaggctgatcagatggaaatatcaaaggggatgacataccgatcgatcagctcattcacaatgtcgcctttccgggtcagcttgggcgtgatatgcgtgtcgatcctatagaagcaagctgtcagctggtttcacccttgagctttgtcgccaaggacgtgactgaccataagtcccacaacgtgtctgtagcattggtccatccgtatcccggagcgtcagcttattacgaaccgttccattggaagcagtaacacgtacagctgcgcgagagaatagctcgtcaatacatgttggacctttccgaaaagcgaacggcgcttgcttactctaggtcaaacacgactaccttgggcgacttggcgacgttgatggatgcgtctgacattctgatatatggcaattataattacggccaccgacacaaattatagagttgttatggtcgctttgacgttatagtgtaggacctttgagcattttgctctggccaacaactttttcgttgctccatcgttgctccctccttgcttgctgacccccgctggaatcgaaagatgacgaatcgatcgatcaaacacggacattgtgattcaatcacagtccgccagtcgttcggagatgaccggcatcttgtacacacctcctctggactctggactgaccgcatcgagttctatatgcttgtgtcgcagcgtttctacattctatgtcgggtcagcttgattggtattggcaaccatacttgttcttagccacagatgcgtgctcgtacaacatggctcgctctcgcgtcggctggtgtcgaactcggacttgcgacgacttcaacccgtccataccagagctcgcaagatcaggtccgattgactcaagacgctcttgggcacgagagaggcgactcgtttcccgatataccacctctcgaagggatggtccatcgttctttgatattgtcaggctcgacaagcaatagagtgaatctcgtcttctttggtgacggctgtaagaacaattctcgcggctccggtatactttcttctccctgaccatcggtgtggtcatcgaacagacacgagtgacgaggaagagattttcttccgggacgctcaacgattgacgcaggacataatccagcccaacgcctcgtatggaccggtctcttcgctgcttaatgtccatgcggtctttgtaccgtcgaaggaggtgagctggactgagcactgtagagcccacaattgttgaccgcctggacagactggaatgggcacgcatgggaaacctagagagcaagtcgaatgtcttctcattcgtttccaaattcattctttcgaacctggacggttctgaaacagcaccgtattcggcctgtaccgtcctggatccgaactccgcgccgtgttttatcaacgtaaacatcgagtgatggaggcctgcaaatacctacgtatgatcggcaaaggttgcgacgagccgatactactcggtaagagaccgcgacttcctgcgacatattggtagcatctgcttgctgaataccttccgatttaggcaacgacccgctttatggcggactaggtggaacgccaacgtgagcgaagcaggtcctggagccttcgccggcactgatactcgtgcagggaacagagttatcacggcttcacgtgtgaacgggcctcttgtactcaggtgggtttcccggatccaatgcacaaggttgccaatctaatgcattgacgagcgtttaggcacgaattgggtcataccctcattccggctggtgaagaatatgatggaggtaaacgcaacgtctaaacgaacggaccgactagtcacgtttgctgacctttggctgtacatcaggatacgcctactttggacccaattctgctccgttatctgcgctgcgtgatggtatatcctggcaacactggttgaccgaaccaaacgagaagttacgcttggaggatagcaaagttccactccaggcttatccgtcagtaacgctttcgctatgtcgtcagcccaatcactgacatttcgatctcgcagatggcaagaccttgtcgagcagccgtatagaatacgcttcaacgcttcaacgggagtataccctacggctctcttgcggctctccgtagctggtatccgctacgaaaaccatctggacgtatctttaaatggggtgccgatcgccttcaccattccaccgcaatctcggggtggacacgacagggcctggatacaagtacccctagattatggtatcgaggcctttgggaaccgttcgcgagaattcgaactacttgttcgactcacacagaagggatggtctgctcctgcgacgcaaggaggcaagatgcttacgtcggtcgagctgattgaatatggaccacaaactaggtaaggtcccctcttgcgtagaacctagtccgcacaatcgggctgacttgaaagatcagcttcaacaagagccggggctatattggcgccttcccgacgttcggcgagcacggtgatatcactcttagacctgtaagtccggcatggtgcatgagtgagactcctgactgatgcggctgtgcgtctgacgctagacggacgaatcgtgtcttatgcgagacgtgacatacccttgtgagagtctgttctgatcagaccggtttcaagtgcgatgtctataactaaaccgtcaaaaccgttttatagcgttctgtccggtctgcctcgaatcgctatatctagcgctcctggttcgggtcgacctgatcgagggtgtggccgtctcttgcaatgagactggcgacgaggcctcgcttgaagccaggctgatcgatctggcagacgcagagacggtttacacatggacaaacgcaggcaaacccgtcgccaatccccaaaacagcccctctatcagagtatcggaatttgggtggtatacactcgatgtggccgttcaagtccccgaggtccgtaagcaagactctcggctgagatcgagtcgaacggtctggtttggcggttgcgacatcaagaaatgaacaggtctgtgcgattaaactcggttcattgttatgcgagacgatataatacactttgcttctcgataagagccgagagccgaccaattactttgggtattgtgatacattttacggatgcgagaaaatcgttgctgtcaacagtccgctcggcgactgtgcgcgtcatcgttgcccaatcgtttagacggtcttccacttggtagaggtcatgccggtaagctgatagtgtccgaacgcaatgaagagagggaaaagcagcacgaacagtcgttatatatcgcatcagcttccctttcttttcctctcttcccgcgcctctcgctcgcaccgtctcagaaccaggcattcaaccagtcccgacggtgcagctcggcattgcaactcacgttcttgacctcctggttcaaggtgggcatgctgtcctcgatagcaccagtctctcggttgcggtatcggtacttgaacgcggcgacttgcctgcgagtcaggtaaagttgacatcagaccggatcgttagacaagaacgcttttcgaaaggcttacgaagggtgcacgtcgtgcttggccgactcgtcccaggggttgatgacatcacgctggaaagctcgtgcggggtcgttgcttcccttcgaagctgttgtaaatcgatcggagcgagatcagcaccgaatcgatagatcgagcaaatggatcacgtactgagcatgtatccggcggtcgcaaagatacctccgacgatgatcaagagggggtagagggcaggatcacgcttggcgtacttgttgacctgcgaagcggccttgccggcttgagaagcttgagcgagacgagcggactcggcctatcgaggaaagacaggcgaggttagaccacgattggttgatattcgatcggacaggtcgcacacgtacggcatcgggcttgggagggagggaagccattgttgataatttacgtgtagtgggtggtggtggtagtggtgaagaagtgcgtgtaggtcaattggtgattgctgctgttgtactcagtccgatcgatcgctacaggctgtgcatgcggtctccctctgtgtatgtatatatatatatatatgtccccggggctgaggtgaaatcgagtaaagtcgagatcgccggtgagacggtgccgctgcctcgacgtcgcggctgctgaccccgtgcccactctctcctttccctgccttcccccccgcacaagtctcctatctagcgcccttcctttcccccctcgctcgctctagcgaatcgaaacggtcccctctcattatgatcgtaaagcgaggtcaggtgatgacgtcaaaaaatgacgaattcaaggcggaaacaaaaatctccaaagcgccgtcgctaggctcaactcggggcacgcgatgcgtccctccatgacgtagcagaatgggtgacgagctccaacggcgtttctcacgagcaagaggggaggggagtctcattcttccgcccgtgtcatgagtttgatcgtcgatcaaaaggatcagatgccgctaattgatctgcaatgatagtcgatagggccataattgcactactcgctactcgggcgtcttggctcgcagagctcgatcgatcgatcctgacaaggggtcttgaagcaagtcacgagttgccgagagccgccatgagtcaaggttggtacgggatgctttgtatgtttgctacgctactgttagctactagctaggttatacaacgaccaatcgggaatcactggctttcactgccgttgttcgtcgcagagtgccacaacgatacgttgttgactctcgcctgactgttgtaatgctcatcatgcaagaagaagaaaaccctctctctcaaaaccccgtcctcgatctcgatggaaatgccacgtgcctcgtcgtcccttccccttacttcttgtagaagctcatcaagtccttgacatcctcgtccgaaccgaggaacacgggcaaccgctggtgaatgctggtaggctggacgtccaagattcgctcggtgccagtcgtggcggatccaccggcctgctcacacaggtaagccatggggaaggcctcgtaaaggatcctcagctttccgttcttggacttggtatcacccgggtatccaaagattcctccgtacagcaaggttcggtggacgtcggccaccatggaaccaatgtatcgcgcgctgtaagggctcccgttatccttggggtacttgatcgattccactgcgagggggtcaagattttcgtccgggcgatcagtactgtgctcggaccgtcgccccggattacacccttgtcgtgcactcacggtacttcaaagtgggctcgtggaagtatttcgagtttccctcgttgaacgagtagatcttgcctcgcttggggatcgtgatctcggggtgggtcaagatgaactctccgagcgactcgtccagggtgaacccgttgactccctggccggtcgagaggaccagctgaggtgcagacggacgaacgactctgatgtcagttctggcttcgacatatggggagaggttgaaatcgctggcactcacgttgcaggaagaaccgtacatggtgtatccggcagcgaccatctccctaccaggcctcaagacgtcctcgagggtacccttggacccctccttgactttgtagattccaaagatggtaccgacattgactccggcgtcgatgttgctgcttccatcgagggggtcaaaggtgacgcagtagttgccgaccaagtgggcatgcgcggggttgctgccgatcatgatggcatcttcctacaatggtcaagaacagtgccgaaatgttagcgaaacggacccggagagatgcagaaggaaacacgactgacccgctcctcagttaccaagaccgaacactttccactagctcggagcgcgttgaccatgatctcgtcactcaggatatcgagcttcttctgctcctctccctgaacgttctctcctccagccagaccgaccctagtatccgtaggacccgtaattcagctcatcaacgttacccggatacgttcaacagtcgacttggactcacaagttgatcaatcgggcttttcgaacgttgctggcaatgtacttgctggtgacctaggacgaccggaagaaaaggggtcaaccgagtccacactgccggcctcgacgcgaaacgccggcacggtgctcacctggatggcagtcaacaacagggtcaaatcaccactggcgttgtctcccaatgtgtattgctgcgagagtacgtgcctaacgagatcatcggaaagaggatacgacgagcaacatgtgagcggtggatttcgggagaagcggttctccgggtcaaagctcacctggtcaaagtgaccaaatcggccgagggcatcttctgatcttgtccggacattttcaaggaggttcttgtgttggtgctgtatgtgacaagagggttcgtagcgagttcgttagggagactgttcgtctaggagcgggaatgactagatttgagccaaattaagacctaccgaatgaaatgaatgtaaagtttgtggtttgatctatatatgtggcaacgggcgaaagagcaaagagtttgacgtcagactaagaattcaagacgtctgaaagaagtcacagcgtggacgacgaagacgtgatggtgctggtgctgtaggtcggttcgagacctagcgcatcggttggaatctggggaacggaggatgcttacctgtaatcggactggtgtcgtgcgaatcgaaatgggtaatatggaattacgggtgcgaggagattgagagctcgatggaaatgaggttgttgaatcacaaggatatcgttgtgcgagtatattaacactactgctcctgcctacgttgacggccggacaaacggttgtgagttgccgttggttgcgttttggttatcgacggcttgcacaacctcgctcgaactcccggtccgggcacgcccggggggctagcaggttggccggacggtgaggcccctccctcccccgcctcggaacgctttccccgcctcgctttgcttccgttccgcgtttctcttcggatctagcgagcgatcatgaccgaacgaggccgatcagacgagcgtccagtgtgctaaacgccagctgctagtggctagccgcctgaacacgttcggggtcatggccatcctaatcagtgtcgtcaatagatcgtcacagaatgtgatggtgaaggatgagacaaattcaggctctcctctatcgcaaacgcgataacagggtcgattgcagcgcaaactgttccggctatccctcaccctttgtctccaccagcgaggcgcaaacacgcagtcgactgcatctcaatcaaccgctactcagtaaatgattgtcgacatgacaatagcacctcatggtctgattgatatcctgccgtcatgagcaccatcgattatcaacttcaaaggcaaaaacgctcgacgatgaaacgaaattaaagtgtgttaagcattcttcgctttgacaacatgacatcctctggcaatcgcacttggcgatacgtcgatccacagcgatatccgctcatcatgcacgaaaaggtccggcgcctgcttcttgttctcgcgccaaattatccagaaatcgtaggccgattcccagtagttatgacagcagatacccttgactacattttgagatccggagatccagccgctcgttctcgaaattccggccgtctcaaacaatctgcaacgagatgtttcaatgagcgtgagactgattgtgaagaaggcgtgacaagattacccaccagccttgtgtggttacgtcagaaacgcatcaacatgtacaccaggagctgcaggattcatgacattggctgcgtgtcgatgatcgggtatgtaggatactttctacttctcgactgctccatatcgatgacgctcaagcaactgtcagtgcgcctggaacttaatgtcggcttgactcgttagcttccggatggaccgaagaacagataactgccggcgagattgatcgtggcgccccctgactgtcctgatccgcacaagctcgatgatccaggtgcgccacactgtatcatattgtaccttgaagatgggcgatgcgcgtgagcagacatgaagcttttactgcagattatccgcgatgacacttttgaagagtagttccgctaaagcagtcagttacaaacctctctgaatccataagatagtcgtacttccgtccagtcgctggcgcaccctgagccgaactcaaaaaaggatatataccatttccatttatattcatattcaattggacacttgcgaatctcctagatcatatcattacacgtctcttacagtacatggctaagagacggacgcaagttgggtcataacacgcaatcgaatcagtggctcccgctaccacttccagaagcgtggtcttcattttcagatgcttgaaccatcggaatagcgatccgaccgaagactccttttacagtcgatggtgcgttctgagtgtgatcccggtcacaacaacatgatgacatggactcgctggagcggtctatggctgggctgatggcatggctttgacagaaaggccatggaaggcgggaaaaattcggttcctcgaatctctcgcttgatccctttagtcacgcatgcgcactcatacgttcaccgaccgttggctctctttcagctgccgcgagtgtttcaagcgatcaagtcatattttgcaaaggagaatggtcgtcgtttttagaaaaggctctagatgtcacccaaatccaacctcgagccatgctacgggcacgcgctcatgagaacaagtagcgattcttatatatggccaatgcgcggcggacatctattctttatctatacgatacaattcatgtttcaatggcttgaatctaccagattagtgtggtatttcttcgagatattacggcagtctagtccacatcgttattcaaatcgtcaacgttcttcttgccattcgacgccgaatcttccggtcttcccttctcctcgggctcctcgggctcctcgaccgcgtccttgacctcttcgttctccgcaacgacgtcttcctccttggccgccacgtagtcggtatcatctaccgcctcgatctggatggccatcgaccagaagatcttctttccgtccctggccttgcatatatagatcgctggctgaccgtcccagtacttgagaagaggaatcctgagtgggaagggatgcggcagaaccacatggagggtcttgaaatctgaagcagagagcaattcaggatcagctccgtatcgtgttagggaaagcaccgacgttcgtttggcccaccgataagcccgttgccaaattcgcacccgaattgcgaatccttgttcacaatgagctcttctcgattctcccttttggtcaaccatcgtcgtcttgccgcgatccctgctgcggtaccagtttcccattcctgcggctcgtcagagcggctgtcctccttatccctgaccgagctcttccacatggcatccagaccagagtgagaatcctcagtgatgatcttgttctcgtccaacggtttgttggccggtttcactgagagatagttcatcgatgccaataggggggatctggaaggtacgacatcagttatagcgtctcgaacctctcgtcaagtccggcttgacatacagcgcccaaggtttatcagaatatgggtccatctcgaccgttggatctacccagctacaaaggattataagtaaaatttcggaaatgtgactgtcaaaatcatcgctatactcacttgataaacttcatcgctatagacgttccccaaggcaagctactccgaataggcttctcgaaaacgtttccaaacaacaaatcattggccgagatgggttcgagatgtttgcctggtcatgcgtaacttggttcgcatcagtacggtagttaccttgaatgccacttcgcctgcgtaccttttaccaccaacgcataagtgtttccttcccttccaggctggccaaaatatagctcttcttccccaccgtttctcaacccattgtaatccttgatccacattgaaatttctccctcgaagtgctcgttcttgattttgttcggggtcgagctgttgaccaaagcgggctcggtgggagggtaggtcgtacccgctttcggcaggaggaacttgagcaggacgggcatctcggtcagaaaaagcggcgacgtttcgatacaggggagggtttgttgtttcgattagaccgattcgttcagatggcagctacaaaagtctgtctaatgggctagctggtgttctggtgatcgtatgtcgacccgcatgatcaggacaagatcagattgtgcgatcctgtgtcgatcatagcttcggcatcattagcttccggtcaatctcggaaaatatacttccgaaaatcatttctgaaatgacgtcaagctgtaaaagggctttgccgggctacaggatagcgatatagcgaaacatcgagatactagactctaccataagtttcggtccatcccaatcgattgctcacacttctgacccggcagctgtcaccagctttcttccaacagaccgaaccagaagaaacagttgacgataacatgtcctttcctcaggcaagtcgtccgaaatgagcgcgatgttgaaagtatcgaatttcgctaaacgtctttgccatgaattctgcagtactatagcatcctcgtgagtcaaaacaggcgccatgcaacggacaagtagcttcagctgatcctcagtttggatccagggagtctccgataaagccaccagcgatcagattcgccaggcttacaagaaggaatgtgagtcctgccttccacgtcgtcacctgtgcgcgagcccctatgaagcgatttactgacccgtcgagccattccctttctcatagctttgaaaacccatcctgatcgactgcccaagggacacactccagcccagaagaaacgtgcgaccgagaaattccaagcggtcgccgatgcctactatgtcttgtccgatccgtcccgacgaagggactatgacaacctggcccgtcaacgaggtggattcggaggtggtggctttggagggggatcttcttcgtcgacatcgggtggaggctttggggcgggagctggagctggaggtggaggataccaacagcaacagcaatctcaaggcccgccaggcggcttccccgactttgactttgccgagttcatgaacaacatgaacaacgctcggaaatcacgtaaagcacaagaagcggaagacgacgatgaggaagaggaggaagagtacgcggacgagaagcagcagaagtcttcatccggcggaatcttcaacacgtttgccggactgtttggaatgggaggaaagggcacgcaatcagatggtcggccagaccccaacaagatgtttggagacgtctttgaggatatgtgagttttgattttgaatcggcctgctcgaaacatccgaaagactgaaacgggtgctcgacattgcaggctagcaccggaagtcgcgcacgtaaggccgttttacagctgggtgggaggcggagcaggtgcagggtgagtgacgtacctaaggatacggctgcggtaagaaattgacgcgactggattgcggtggtgatggaccatatcggttgatttggacagcctcggatacatcgtcgccaatgtcccaggagctgtagcgggagctgcactagggaacagattgggtgccgtcagagatgccaagggcaagagtgtagctgaggtatttgtgaccctcgatccgggcgcgaaagccgaggtcagtctctcgtcctcaatcaaacaaggattagagctaacccttgttcactcatgtctgctagatcctcaaagttctggcgatgaaggtattgggaagcctctcatcatgataaggaatggctccaaatgtttcgactcgacattgtacaattctctataccgttacccagcgctttagtgtttgcgactcgctgttatttattgtccagaatattattcagcatcactgtttctattcgaacggctgtcggcgcgtctttctgctgtgttaggaagtccagctacctcggaactcttctggtaacgtactgcgtctggaaatacaaagcctctcgaacctattccacaaggattcgtccgcgatctgaaaatatcattgctgctagcactaggtctgacatcgttgtggctagttccagctcagaatcaacgtcactgttgggcagaggttacaattcccatcacagtctgtttgctgaaggacaagaatgacagtggattgttgaccaggatcagacaaatctggatcttactcttgggacctatcaaggcatctcctgggcccgtgtcggttcattctcctgtagcaaggaatccatgtattaccgcccatcgcgagcttgatgtattacgattgttttctgcaaagggcctccggcttaaaagagcagcaacatgcaaatggcgagccgctgaggagcgaataaggagacatgactataactagacacagataagagggacaaggtacataatacacccaacgtgacgctcgaccgccgcccagcgatcagttcctccccttgttcctcctcgacttgcccggtcgactcttggctccgctcttgggcccaggcttgcccttgtttgccgacccgccaaagtcgttggtgctttcccgggtgttttgtttcgatcgtcgaccgccacctcccataccaaacttggcgtctcttgcgtgtcgaggcatctgtgagcggcgagaatagaagacgagtcagtactgcgtcaacagctcctgtgctgctaatcccaagcagaaaatccgtcccgaggtgacgcaccttggatttgccatccgcctttccacctcgacctccgcgaccggaatccctgccacctcgtccttcgatcgcgtcttccaccctgacgtcgaacgcgcccgactcgccatcgtccccaacctcgacaccgtcctttctcttcctcttgatccccctgatcctctcgtccatgccctttcggtcctgtacacgctgtttgagcttttcgtgctggatctgctttccgtactttttgaggtctcgctgtttcttggcggcttccgacttcttgatccccgaggcttcgtccacgagacgggttcggactcgttccatgtgaacgtcagatttgaccatctcggcgtagtagtcgctaggcctggtgaaggggatatcggcctgtttgcagagctttcgggctcgctcgacgatggacaaggcttgcttgtaactaaaagtggagcgagaagatccgatcggtcccacgtgcgccggtttcatgggtcgacagtcagacttacaaggccacctctcgcttcaaatcgtcattgggatcgacctcttcaagagtctccctggtagtcagggtcaagtgctctccgaaaggcatggccttggtgatgttcaactcgtcggcgtattgcgtgagtgcagcctgaacaacgacgtaatcttcatcagctacttgccattgtcttcgtcgaattctgcggcgaatcagcaagccgactcaactcaccctgttgttgatgatgaccttgcgggcagggacggcatcctcatccacgctgtagttggactcgacctcgtcaagagcgagatcatcggcggtctgtttctcgatctgggcggtcgtcatctggaaggaaccacaaacgatggcgagtcggttagtgcgaggcgacaagcggagtgacgttgctgaaggggaggtgcgtaccttcttcagagtggccggtacgtcctcttcctcgtcctcgtcgtcgagctcgtcatcatcttcctcttcgtcatcatcttcctcttcgtcatcatcatcgccgatctggcttccatcaccacttccgtactcgagctcatcctcgtcatcgtcctcctctccaccagcgacgctggacaagacttccatgtcgaaatcgttcaagccgtcctttccgagcagcttcatgagcttttccatcccttcctctgttacaccgtcgtattcgtcgtcctcgtcatcgtcatccgaatcgacgtcctcgaaatcttccgagtcctcctgctcctgctcctcatcgaccgcttcgacctggacgggagccttgacgggagccggagcgacggctggctttttcgccttggtgtcggtctttttggcgggcttgccagccgactttggagcgacggcgggggtttgagatttctttgccattcttgttattgtcaacgaggcggtgtttctatgcctaaaaagggtgaggggatgagatcgaccatgacacttttgaccaaccttgtcgacctcctgaatctgaatagcagcctaaccctgtggtgatccgagataaaatatcgaatcacgtgattttgatatttcactgcgtgaggcgaggccggggggaacggaagcaaatttataataatcatgtacatgtaggtggaggcgtagtgaagaggttcagaaagcgaaagtagatcatatccatcaaacgattaaacaaccacatacacacaccggtcaagcttgggtagagagcaaaaatcagaacaccgaaagactaaaagaaagataagctgagtcgggagatatcaagatgccgaaagccagtgagctgcttcgttttgagaggccgaactctaacgttcgactaagcccggacttgttacgtgacagacaaacaatcgcagaataaatccaagaacaagcggatcgatgtgcctcagccgaaaaagaagactcaaaaagagctcggagtacccaagttgaaaggcctccagcgagcagtcgatgccaaggctgctaaagcggcaagggtgagcgtggcctcgtaagatccgtcatcatcggtacctcgtgctgatcgacaagcggaccatctcagggagctcttcgaaacgagcagaccatgcgtcatctcttggccacatcgacatccaccaaacccctcatcgacgaccttcccgacgtcgtcgcgtcgacggacccgttctcgacgttggcctcgacagaacacttgtccgcgctccgagactcatccacccgagcgttcacgagggaattgaaaaaggtcattgatcggagcgatgtcatcgttcaggtactggacgcgagagatcccgaagggacccggtctagatgggtggaggaagaggtcaggaagaaggaatccgaggggaaacggctgatgggcgtcgtcaacaaaatcggtgagtcgcagtatcccgtcacgccccccgcagaggctccagttgatcccgacctcgcgccattgtcagacctggtaccaagagacaacctcgaagcctggttgaagcatctccgacactcgttccctgtcatgcccttcaagtcgtccactcagtctcagcgacagaacctctcgcaagcggccatccacctgtctacgaacgccacttcgtccaagacccctctgggtactgcgtcgtcgtccacatccacacacaagaccacgtccgaccctatccctacgacctcggcatcgctcggagcgccagccctgctccagctactcaaaaagtacgcctctacccaccctcaccagaccttgacggtcggtttcatcggttaccccaacgtgggcaaatcgtccctcatcaactcgctcaaacgatcccgagcttgtcccgtggccgccatgccgggaaagacgagggtgatgcaagaggtcgtgctcgacaagggggtcaaggtgctcgattgccccggagtcgtcttggacgatttcgataggatgggtctcgccctggacgagtcggaaaaggggaaacgaaagggagccgtcttgctcaggaattgtgtcaaggtagaggaagtcgaagaccccatggctgccgtggaagagatcctgaggagggtcgaagtgagcaagatgatggagctttacgaggtgccggaatacaagaacgtcaccgagttcttggtcagggtcgccttgacccgtggaaggttgggaaaggttagcaaaagatttgattttcgtgccttttcgtgtcgcgagaacgatcgtactgaccacacggtcgtatcagggaggtatcccggacctcatcgcagctgctacggcgatcctacgcgactggaacgcaggcaagattccttaccatactcagccgcccaagatccatccttcggccaaccttaccaaggagaccgagttggagggtcccgttggtgaatcagagatgcaggtcgagaagggtcaacaaggcggggatgccatcctgtccggtctaggtcaagcgttcgatttggatggcttgttcgcttcctttggtgggggcgagtttgacgaggacgaatgggtggacgaggctccggggttgtgtccccagcccatagaagacgaggtagaggatgtcgatctcgggatcgaagacgctcaaccggagatgcccgtcgatgaggagtaagctttgaaccggcctttgtccctcgacagacttgccgctgatacgtgctcccttttagcctcctggatcgtatggcggcaggaccatctaccatctcagctcccgcctttgcacaatcggctgccgttccctcgacttcggcctatgcagcgagtgcgacatcttcagcgtcaacagcaccccggatcaaccctctcgccctgttcacgccagccgaaagagccctgttgcccaacaacccaaatctgaacccgctcgaccgaaaggcgcttaagcaaaaggccaagaagcaggccaagcgcagtcgagaagccgaaaagcaagaaagggcggcggacgaggacatgtttgacgccgcggcactgtttggttcgatgaacgtcacccagcccaagcgcgtcgaggtcaagaagaagaaaaaggccgataccggggcaaagggacaaaaggtcaagggttcgatcgcccccgtcacgatggacgccgagacgcagaaggagctcgactttatgagctttttgaattcggtaggaggtgcgttgggtcagcggtgttctgactcgatttttcttatctgatcgctaatatcacctcgctatttgcagctgaaggtggagatgatgatgatatggaactgtaatctcagactcgaatagacgcgatgacaacgcctgcaaattttgctactcgattgctcagttctggctcagattatctgcagccccaaacatttctgttctagagcatatacatttggcatgcgtgatacgggacagccgaaacctggcgcgacatcacgtgaaaccttcgacgagtcagaatgataattcggtagagcggtatgcgtgacttggtagactgaaaggagtcctatgtattcgattctagtcacaggtaattggccgtaaagatcgtacaagttggtgtgactggaatctcgatagaccaagacgatacaaacagacgtcagctctcaaaattctgctgcggatcgtcttcacgaaaccgctgttttcacgccgagctctacaaatcaagctcccggaaacctctaactctccgtcgctactgcaacatcgcttcaatagtacacgctcgagcgaaattaaaatggctactcctgccgcagctgctgctgctcagtccggcgataccctggacttgaaaaaggcgagtgacatcgcgggagagcgaatagcttcacgagagctttcaagctaatgttcgaatatccctatctcgatgcgtagaccgccaagcgagactatctcgtcgatctcgaacacaaggctcaagctgcatgggccgagaagaagctcttcgagactgatgctccggtccctgccagcacctacctcgagtcggtctcgggacaggcgccgacaccatccgagatccgagctcaacaagccaagtggatgggaaccttcccttacccttacatgaacggttctctgcacctgggtcacgccttcaccatcagcaagatcgagtttgcctgtggtttcgagcgaatgctcggcaagaaggccttgttccctatgggtttccatttgaccggtatgcccatcaaggtcagtctgacctcgaagacgaacgcaccagctggcatcaggctgaccccatccgttgcgcgtgttaacagtcttctgtggacaagctgattcgggagatggaaatgtttggcgaggacttctcaggctacaaggatccagaggacgtggacgaggctatccctgaacctactgcgcctcaaggccagaccgatgtcgccgctgctgccaaaccggtctcgagcgacccctctaaaggaaagaagggtaaactggctgctaagagtaccggactccagtatcaattccagatcatggagttgattggagtgccccgagaggagatcaaaaagttcgcgaagcccgagcagtggatggaatacttcccccctatcgccaaggtgaatgcgagttcgctcgaaaacctctcgatacaacttcgctgattgtgataatgaacacgctgcatagactgactgtaacgctctaggggctcgtattgattggaggcgatcattcgtcaccagtacggctgaaatggatccgaccgaatcatagtcattgtgctgatgctgatggactcttgcgacattttcagccgacgtgaacccctactacgactcctttgtccgttggcagatgaacgagctctacgcgcagggccgaatcaagtttggcgagaggtacaccatttattcgcccaaggacgaccagccatgcatggatcacgatcgttcatccggagagggagtcggacctcaggaatacactgctatcaagatggaagtcttggagtggaacgaggccgttcctcaaagcgtcaaggacgccgtcaagggtaaaaaggtttccctcgtcgctggtacccttcgacccgagacaatgtacggtcagaccaactgtttcgttggaaccggcattacctatggagtctaccaagcctccgagaccgaggcttatgttatcacggaccgagccgcccgaaacatggctttccagggtatctttgaggaacggggtaaagccgtcaagctcgccgatgtgacggggcaggacctggtcggaaccaaggtctcacctccctttggtttccacaaggaggtttacgttcttcccatggagggtgttctggcgactaaggtatggacccggtcatgtggtagactagcaatgacgactgactctccctcgatcgccatcgattccgcagggtactgctgtcgtgtcgtgtgttccttcggactcgccggacgattacgctactcttgccgatctccgaaagaagccagaatactacaagattaaaccggaatggattgccgccgacattgtgcctgtcatcagcacgcccaaccacggaaacttgatcgccgagtcgctcgttcaaaagatgaaaatcaactctcaaaaggacaagatcctcctcgccgaggccaaggacgtcgcgtacaaggagggattcaactttgggaccatgttggtcggagattacaagggagaagctgtttccgcggccaagcccaaggttcgacagcagatgatcgatgccaagttggccttcgcctatgcggagcccgagaatcaggtcatgagccgaagcgccgacgagtgcgtcgtcgctctgtgcgatcagtggtacctggactatggtgtagaagattggaaggctcgagctcagctgtgagttgatagctcagtttgccggcactaattacctcgaactgacccggcgatgtacgaaccccggtatagcttgctcgaccgtatgaacacctatttccaggagacgagaaacgggttccaaggagtccttgactggctcaatcaatgggcttgtgcgcgatcttacggtctcggttcgaagctcccttgggaccctcagttcttggtcgaatccctcagcgactctaccgtctacatggcttactacacagtttcgcaattcttgcaaggtgagcaggaactcgaactctctgaactagcacgaattgagcgcttaccttgagcgagacccaggcggcaacatctttggaaaggagacgggtccattgggcatcaagcccgaagagatgactgacgatgtctggcgatacatcatgcaaggaaaagagctccctcaggacgccaccatcgaccgtgaaaaggccgctcaactgagatacaacttggaatacttctaccccatggacatcaggtcatccggaaaggacttgatccccaaccatctgactttctgtatctacgtccactccgccatcttcccggaggacaaatggccgctctccatgcgtgctaacggtcatttgatgctgaacggcaagaagatgagcaagagtacagggaacttcctgaccctcagcgaggctgtcaaaaaattcggagccgatgcgaccaggttgactctggccgattcgggagatgaaatcggggatgccaagtaggtcttccggcgagtctagctctactggcactgagctttacattttcctttggatagcttcgaggaattgcttgccaatgccgctattctgcgtctgcacacatcgatggaatgggcctctgtgagcagttgatttaacttgccgccatcgcgtgagccttggctgacaggcaattcgtctcgcaggaaatgaagcaggctcgagagcagggcaagatgcgttcgggagagtttaacccgcacgacgaggctttcaagcttgagatgcaggctctcacgtggcaaacgaagaaggcttacactgcgtgagttgaaattgagctggcggccggatcacgcggaacgatccacccgtctgacgcgcatggtcccgcttttagcacgttctacaaggaagccctccgaaccggattttatgaattcgaaaccgcccgaaattggtaccgtgaggtcacagcgcctgagaacggtggatccggcatgcacggcgacctcatctttgagtggatcagaactctggcgctgctcacgcaacccatcatcccccactttgccgagttcatgtggcgagacatctgccaggagaggggttccgtgcaggaagcgctctggcccgaggtcgatggcgccgaaaacgaagccgtgctgaagcaactcgagtacatgcggggcgtcatcgggtctatgcgttcggcggaagctttgatggcgaagaagaagagcaaaggcaaggctgtcgcgtttgatcccagcaagcctcgcagtgccaggatcatcgtcgcgaccacctaccctgcatggcagagcaaggtcatggaagccttgaagggagaataccaggccagtcaatcagaagacagagctattgatgacaagaacctccgtgccgccctcgacaaggccggtctgctcaaggacaagaaggccatgccgttcttgcagacgatgaaggtgagtgacctttcggtttagactggaacaggcactagcgggaatccccgccggtgtctctgtctctgtttctgcctcgctcgcgtccggagtgactgactgcccttgccaaacgcgggtccacagcgagctctccaacagagcggtccttccgtttttgagcgggctttgccattctcagagttggatgccctcaaatctttgcttccttacgtcaagtccaacatgaagttcatcgaagtgactgtggtatctcaagaggaagctcagaagcacatcgaggagcacggtgaggatgccaaggctggatgggaatctgccaaggtcgaggctgccctgccaacctcgcccgaagttgtattttggaacgccaacgcttaatagcgaccagagggccaggtcccaactcttcctacgtggaccggagtctaaacaaactctgaagtaccaaattgaaccatatacttgacccaccctccgatccgttccattcctttcgccagtcaattcgtgatccagtggcggttgtctgtttcggcctttgctatctgtgcactttgttcggcgaattcttcgccaatcctcgcggcgttgcgcgtgaacgattcaactaatttcgcgagctacgcgctgggtcctagacatgaccaagggtctcagtagcacgttgccgcatcgatccacctgaccgaagccccgggccaagtaccgatcccgatacgtgatcctcgtcagtggatcatcggtccagaggacgggttcgatttgtcatgggtatcgtcgattcatgtgaatcgtgccatcctgatgatcgtaccgaccttggcgcgggaccagattccttatagcgtcctatcattcccgacatcctttcacaattcagccgggaatctcagcgagcttggtaaacgaagcgataacaggggcgacatgaacttgctggtctggtctggtttaccgaatgcttgcttcatcgtgcagatggcgaggaagctcggtcacatttagctgacgactgcggaatttgtgaatcccagaacgccgacagagacattttgatagggctgccgatcgacgcacatgggctcgtgtgcctcgtcactttatctctttccgctgcccgaacctgtaggaagtcgacccgacacatcttcgaatcgggctggttcaccgcggtctcctcccgccttgttgggcaggatgatgggtttcattggcgtgagccgcaaagacagaaggtagaagtggaagagggggggatccgcccgtttgtcccgcttgcatagtgcgttcggtctcgcttaatataacgagcgcattctgcccagaccaattgatcgatcccggcgacttcttcagctatcaagacgggcctcgatcgatcttcccaagcctcttgctagagctgatctagagtattctgaatcggtatataccgaggcgagcatacgaaacccacaagtgcccaaggcatcgttcaggggtcgggaaccaagcccaatctcgcggaggggcccttgccgcgaagcatcatcccaagcttttgctgatcacgggtcacaaaatccatcaaacactaaaagcatagcgactttcgagccatcaaataccacttttgctggtcgctcgatcggcaagacctctgatcaatcgacaaaaccgccaaaggagggttcttttgggatcaaaccctcggtgggcgaccaaagagcgggcgcaagttcacgctttccgatttgaaactgcatcgtccggataaattctacgtcggaacgcagtcgatcctttccgctctggttgaccatccacgacgttgaccgtcacgacgaaacggatcgtgttgttgaattgcagatttacttgatcactgatcgctaatcctgcatcataacgacgatccacctatctcattgggttgtgcgctggacggccagcgcgagaacgcagggaaccgatcaatccaataataaaggcatcactatcaaagtccagcttacaacagacaataacaaagcgacgacatacctttgcttctccaattgatcgaaacatctgtcagatcaaaggtccaaaagactatcccagcgattattacagagccgtgcaagcggatctcacttacacacacgcacacacacatccagtatctcttttgtcttctcgtgtaagcctcggcgtctcctaccatcgtctgatcgacgtacagggaacggatcaaataagatctatttgaaaaccgtcgtcaacaatcgcatcgcgagtatccattcgtctggccgtcatgagcgcgcttgctgcattgctgatcccgcctttgctctcggacgattcagatttcctcccttcgtacatgccgcagtctccatcaagctcttccagagcgccccgaccttcgcctttcccctatgtcgggtccaccttgcgagcgagtcttcatccagcctctcggccgcaatcgcccagtcccacagctaccgacctccccattcccgaaaagtctgcgcagtaccgacaattcgataatgggaagggatatcagagctttgggctcccgacagcatctgcaagcgttccgtcgatagacttcgacttcaatggggctcaagtgtaccagcaaccgatggaccatagtatcattccaacaccggaactcttgggtgcccctttcgcctttaaagaaccgtcgaccacaccggcatctcccctgcattcgggaccgacttcatttacctcgaactcgcctgaccgatcattccgagatcgatatgatgactcgccaggctgtgatgacgacaacgagtatgaactcccgcccggtactcgcgagacgaccccacctatcaaagctcagccaaagacgaggcgacctcccaatgcttggatcctgtaccgatcagatcgaatcagggaatacaacaagctcggctcccttgccagtttcgcggcatcacgccctactggcaaaaagggacagccctcgaaaggtccacctcaggctgagattagtaggatcatcgctgaacagtggaaaaaggagcccaaggacgtcaaggcaaaatacgacaggttggcagagataaagaagattgaggtcagtagcatgacttttctttcagctttcgagttcgactttgcgcatggggtcaccctggacgctgctcgcgctcgtgccgcacgcggcatattccgaatctctgtctctctttctcctgtatgcatccgttaacattagctgaatcgaattgcttcaatcaattgcagcatcaacgcgactatcctgattacaagtatcagccaatgaagaaggaagaaaagatcaagctcaaggagatgaaggatcgggaaaaggccttgctgaggaaagagaaagcattggacaaggcaatgcgaccaaggaaacctcgcacaaaagcacgtcccagcctcgagaaacccatcccggagaaatccctctccggacatttagtaactccgcggtcaccttcgaaaaaggcgaattccaggaagtctcgaaaggctccgacgcctcgaacggccaagggcaaagacagggtcgaaggagacgacaatagtggtttcctggacgggcatcaggtattttgggggatcgtcccagagcttcgtaagtgatgaattactgtgcctgcgcgcgacttttgccgtttcactaaccattcaaacgccttcacacgtttttttgctgctcctgcaaatgtgacaccatccggctgttgtgtctcgtatcctcctgcaccatgccggctcgaatttggtcccacagccaactcttatgtcgcgcccgaattgattgcgcccgaatcgcgcgtgcaagacgcttctgaggcttccggacatacagctgctcagatgcccgaaaccggctcggacccgaacccccaagagttctggcatcattcgaccttcccctcggtaccccctgccgaagctggtctggcgatcgattcccagtctatcgtgccatacattttcgagcccgcaccgttccccgacatctcggcgggaccgacgtaccagtctttgaactcgtcgcaatctggctatcacccggatcactatgggccatcaggcccttcgccattgcgacaggagcccttaccgccggtagagattcccggggtcacggaaagcgagttggcagagatgtggggtcttctagaagatgacacagtcggtgcggataatggcggcgtagacagtcggcccatcgtcaactgggcatctgatcccgccgagctggtcaaccagtgggcgggtctgagcgttccaatcgaagatcctactagctacatttccccgagtaatttctctggatctgtcgctagccagattgcatccgagtggaacaaccagccttaccactcactacagcctgagttccagcgtggaccacactcggctacaatgtaccatcacctaggtacttatcaggatcactatgcacaacagcaccagtatccttcttctcgcccgggttacgttaccatcgaggtccctgtgtcatcacttcaacagccttatcctcccaggccaccagcctacccctcggtccaccagggcccaccacttacccaagcgactcctctcagcccggtcaacggctcttttcccggcgtcggaggctggtccggtaacgggagtgacggtcacccttcattctcctcgttagctcaggccgacggcagaagcgggaggcggagttacgagtacagttcgcccttttctaccgctggtctaccactggacaaccaaagtgacaatccgcagtcgagtcttcggacgcccaactacatgcaatcgattgacgggacgttcgagtcgatgcagagtcgcagagtgtcagaagtcggccctctcgagaacgacgactggatctcgcccacggaaaggatgccctcgttcggagactttagattacccagcggtaatttcgttgcgttcccggaaccagagtttgacctgccacaggatcaactcgtcgagcctgtacaccaaaaaccgcctatcaaaaacggtcgcgtcgtcgccggacaacatgcgcctcctcaacgggtcgcgtcatgacgacgtgaccgtagactttcactattctctatatatgtcgataacagttgtacaaggcctccaggggttgcttgccaaacacgccgcgaattgcgcctttataatccagccggaatatgttgtaaatacgaccacgtctgaccccatgtgcccacgtcgatgcatgatctttatgccgaacgcccagaatcgtcgattccccgcgccaaaagtcacgtgttctctccgaatggcagcaacttcgctcaagtgacgacagagcatctgcaacattcttggctgacgtttcctttagaagctctaacccgcccaccctctaccatctctcaaagcaagcaaaataaatccacaatcaccatccaaattcttcacaaccaacaactttccctcgtcatggcatcatcaccttccaccacccccgacctcgctctatttgctcgcggaaccatcgccctgttcaccctctggccggcccttcgactcgccgtgagcgaggaatggggtggcccggaatctgcagaaaagaggacctggatgatcagcgaggtcgtcgattactttgagagctgtctgcccaaggacaacgagccgagcatggccgaggaccagctcgccgacctcgtggatcaggacgacctcgccgagatgctcgagggcatggtcagtgacgaattcgaggtcgatttggacgatggatcggccgatgaggtcgctggggatgtcgtgaagctctggaaaaaggtgatcaagggcgacaaggcgatggtggacgagttggaggaattggtcaggacgacagggagcaaaaaggttcaggctcaaggcaacggggacgacgacgaggagctcgacgaggacggtaaccctctgcccgacagtgaaggatcgtccgaagacgaggacattgagatgtctgctcctgctcagcccaaggaaaagcaggaacccgtcgttgatgacgacggtttcaccttggtccagaaaaagggaaagaagtagaaagcgaggccatagaaggagggaagaagaagaaagaatgaggagcaggagcaggagcggaacatgaaatagccaacgattacgaacggcaacgcgtgtagatgtgtggaattgtaatgaaaactcatacgaaggctctcgacagctttacagcataatcgcgccagatttcctgccgagtaattttcgccgctgtccgctcaacgacatgatcatagcctgtactacatgtatgcagtctgctaagttgaaacctcgactcgagcgagagcgacaggtttgactaaacatcgcatgtaagaccgctcggaggtccaacttcaactccccttcaacctgaatttcctatttttttcacgtgatcgcgtaaatgtttgaatcgaccgtgaacctcggtcgagcgagcgttcacagaacatgcaagagttttgacattttcttgcattcggaaccttgagttcggaagatcagccactcttgccttgctacgatatagactttcagcttgacaagcgaggatcacttactggaaagctagctcaggaatcctcactggccaactggcgggtcatccttaacgtcctcgacaagtgggaaaaagaaaaggcctgggccgaccaacccttgaagacgacaggcagacccgaggttcttcacgatggatatcgcacactcccttcctacccaggccaaggccatctccttctccttcttgtccagccgggatatcaaggatatctcagtcaagcagattacgaatccgatcttgcttgacaacctcaacatgccgactaccggaggattgtacgatcccgctcttggaccttctgaccgagccgacgtgtgagttccaccattccgcatcaccatctgagagcattaaactgatcgattctttggatgaattggatataccttgaaaagctgtgcgacttgtcacctgtcgtcatatcaatgtcccggccatttcggccacatcgagctgcccgtgccagtgttccaccccctcttcatgaaccaggctttcggtcttttgcgaagtgtctgcatgttctgtcatcagttcaagatgcccgagctagtagtaggtttctgctcagagcttcgagttgcgtcaggagtggttctggaagctaaccgtgatcgtgacgatagctcaagaagtacatcgctcgtctgcaacttctcgaccacggtcttctggccgagtcccagatcgtagccagtatgacgcccaaaacccggtcgacaggtaccgctcgggaagacgccgaggatggcgaagaggcggtaccggtcgagaccgtcgaggatttctcggcacggatagacaaggccgtgaaaaagttcatcaacgactcgatgatgcccgacgagggagtcgccgacgtcggaacctctgacaggaagcccaagctcgggaggactcagcccgccggtcgggacaattacaaggacggactcgtctatgccgagaggagggatctgctgcacgagtttggtcgcaaggcttacatgaagtgctcgcattgccaagcgtaagtaccgatgcagctttacgtaggccatcctgcgcagacatgctcaccgtatcgtattcatattggtacagcgcggcctttacttaccgaaaagaagggacggtcaagatcatcgagtacggtctttccaaaaagcaccaggatcagaacatggcgttgggcaggaaacgacccaacgtgctggccatggcgaagcgttccaaccgagtcaagaaggtctctggtacagccgacggcgatagcgactctggtcacggtggaagcgatgtgtcgggagacgaagccgaaggcatggatgtcgacgaggaacctaccgaagacgagggcgaggtcctcatggaagacaagatcgacggtgtcgcccgaggggtcaacggagccatcaaaagctctcgaggtcgagatgagcggatcgtgatggccgaagaggtgcgagagcatctccggatggtcttccacaatcaacccaccgtctgctctctgctttacggtcgacatggacccaacgtctggcaatcggagacgagcgccggttccgcgttcaacgctccctctgcaagcgcagatatcttcttcatggatgtggtacctgtccctcccactcgattccgccctgcttccaagatgggagactcgctgttcgagaatcctcagaacagtttgttggccaagattttgaccacgggtcaaacgatcgtcacgaaccgaacacgcttggccgaattgcaacagtcgatgccggacgtcgaggaagcactcgaaaagacggccaaggaggccgcattgcgaacgtggactcagctgttggaaggaatcttccagatccagcacgatgtcaacagctttttggacagctcgaagaacccgaccatcatgaagggtgggatgctgccgcctgccggtgtcaagcagattttggaaaagaaggaaggtcttttccggaagcacatgatggtaattactcgctagacttgcaagtcataacgtgactgcgaaagttgactttctgcatttccgtcgtagggtaaacgagtcaactttgctgctcgatcggtcatttcgcccgatatcaatattgagaccaacgaaatcggtgtgccaccagtgttcgcgcgcaaattgacgttccccgaaccggtcacgcctcataacgtgcacattatgcgtcaattggtgatcaacggtcccaaagcctaccctggagcaatgatggttcagaacgaggatggtcaacagatctctctcgagagaaagacgatcgaggaaaggaccgcgatcgccaaccaacttttgactcctcaggaagggtccgctgcctcaaaccccgatggtctgacaacgcgaacgcctgctgtcaacaagaaggttttgcgacacttgcaagacggcgacattctcatcttgaaccgtcagccgacactacacaagccttccatgatggctcatcgcgccaagattctcaagggcgagaagaccattcgaatgcactacgccaactgcaattcatacaatgccgactttgacggagacgagatgaacatccatttccctcagaacgaagtcgcccaggccgaggcccggatgatcgccaacaccgacaaccagtaccttggacctacatctggtagccctctccgtggtctgatccaagatcacgtcgtcgctggagttcacatgtgtaacaaggctactttcttcacgagagaggaatactaccagatcatctacggagcccttcgaccagaggacaactataccggtcaaggtcgtgtgcacacgttgcctcctgtaatctggaagcccaggccgatgtggacgggtaaacagatcatctcgactattatgctcaacattactcctcctcaactggaaggcttgaatctagtttctaagaacaagattcaaaatagcttgtggcaacgagacgatggttcagatcccaacatgtccgaggaacaagtagtcttcttggacggctaccttgtccgcggtgtcttggataaatcccaatacggagcttcggcgtatggtctggtccactcggttcatgaagtttatggacccgagagcgccggaagattgctctctatcttgtctcgtctcctgaccaaatatctgcaacatatcgctttcacatgcaggatggatgacctgattctgacacaagagggcgagaagatccgagcccaaatcttagaggatgctaaaggagacggagctcgcgctgctatggaatatgtcggattacccaaggatggcgacctgaaagacccggacactgctcgaaaccttgccatccgtctagaggaaattctccgtgatgatgacatgatggctgggttggacggtgctatgcaggcagccttcaacaaaaccacctccaagatcaacaacgttgttgttcccggtcatctcgttaaacccttccctgacaacaacatgcagaccatgaccatctctggagccaaggggtccaaagttaatgctacgcagatctctacgttgttaggacagcaggctttggaaggtcgacgtgtacctaccatggtctctggaaagactttgccttctttcaagcctttcgatacctcggcgcgagcgggtggatacgttgccaaccgattcttgactggtgtgagaccgcaggagtactacttccattgcatggccggacgtgagggtttgatcgacacggccgtcaagacgagtcgttccggatacctgcaaaggtgtttgattaagcatctcgaaggtatcagggtacactacgatcacactgttcgagacgccgatcagtctgtattgcaattcttctacggagaagacgccctcgacgtgactcgtcagaagcatctctacgaattcgacttctgcctgcgcaacatgaagagtttctccaatcggttctctgccgccgacatcgaggacaagatggaccaaaacacggctgtttcgctcatgaaaaagtcgttgaaacgacccgctaagtacgagccacccatgtcaaagtactcccccagtcgatatctcggaagcatgtccgaaaagtttgccgccgaattggacaaattcgtcgagaagaaccccggtaaattgctcggcacaaagaagacgcttgaatccgacatccctcaaggtctgcgacacgatcagctcgtcgctcctggcacattcaagatcttgtctcgggtgagatatgtcaagtcattgattgacgctggagaagctgttggtctgctcgcatcgcaagggtgagcctggtcgaccggagtttgcgccattagaattgtcttgctgatgccccacactctatgatgctatagtgtcggagaaccttccactcaaatgaccttgaacaccttccatttggccggtcacggtgctgcaaacgtcaccttgggtatccctcgtctccgagaaatcgtcatgactgctgccaaacaacccaagacgcccaccatgaaattgcccatcaacgccaccatcagcgatgatgccattgaaaagttcatgaagaagaccagtcgattgaatctgtctgaagtggtcgaacgcgtcactgtcaccgaacgattgtcggccaagaccatcgagcagatcgaccgtcgacgtacctacacggtccttctccagttctacgacaaggccgaatacctcgaggagtaccacgtcacccccaagcagatcatggagagcctgccatcttccttcgctgtacacctccagaaggagattacgaaggagttcaaggcggctgccaaggctttggcaaacgacatcaacagtgtcggaaagggtcgtgccgtgcgagagaacgcagaccaagtcaatgaggatgatgaacgggctggccgagatgaggagcttgacgacgacggcgacgcttacgagatgaaacgcaaagcgcaagccgaacagatcgccacctacgagtctgacgaagaggaagatgccgacgagcgagatgaggaggacatcctcgctgctagggttgaagaggacagtgacaacgaggatgacagggaaggcaaagtagacgacattctggaaaaggcaaaggacgaacagcgtatcgaggacattggcgaatactttaagttggcctcgaaatacgcgacatccttcagctttgacttgatcaacggtcgatcttgtcaattcgatctcgaggtgagttcacttcatggtgcgacaaaccacgaaatccgactcatcttgcgatttctactctgcagttcaccggaaactctcaaaagctactgttgatcgatgtcattgagcgatgctgccgcaaggctgtcatccacgaagtacaggccatcggcaggtgcatgaagattttcaacgacaagggagaattcacagtatgtactaatttctaagcctcgttgtcgccttccactcaccaaccatttgtacttgtagcgtcaactcattacggagggaagcaacttgccagccatgtggcgtattgcatcggatatgattgacgtcaacaaaatcgataccaacgatatctacgccgtcctcgagacttacggagtagaagccgctcgagcagcgatcatccgagaagtgtaagtcaggtcgtatggacccgttttcccgtgcgaggcactctgctgacgatgatctctcatgatgtagttctggagtgttcggagtatacggtatcgcagtcgactaccgccatctgaccatcctcgccgattacatggtgcgtcaattttcatgcagcatattccgacacgagctgactcggcattgtctctgcaaaacacagactcatgaaggcggatacaagccattcaaccgtacaggtatcgctagcaagagttcgccgcttctcaaggcttcgttcgagaccactggcgcattcttgtcagatgctactctgcacggagacttcgacgatttgcgaagtcctagtgggagcatcgtgatgggtactcccgttaagaccggtaccggatcctttgacattaggaccgccgtcgaagcttactagtcgtgccggatatagacgcaattcgttgtaaacaccattgtattcaagacatcattatcggtccattgtcctgcttgcgaggatgtatatgcataataccacctggcacaacgtgtatacacaccaatgttctcaaccaaaaccttgatctatctaatagctctcgatgatttcaaacgccacatccccttcggtttcatgatcgttcctgatggcaccggcgatggcagcttcttcgtcctcggaactcctctcgatgatgtgctcctcgaccacggtgtcgacgggctgaagctgtacaacgacgggcagggtcgattggcttggagcattggtaccgctagtaacagccgactgaacggatccgaccgagttggtcgcctctcgagacgcagagctggcggtttgcctgatggctccggcgatactagcggtctggctagcagcttgatctgtagctgaggatcccaatgaagaaacagagctaacagatcctcgcgcttgactcgacgcatcgacgacggcggtcgagatctgtgcggtcgcttgcatcgccgaagacgaaacgctcgaggccgctccctcgacttggtctccggcactagcgacgcgagattcgccagcagatgacaaggaggagacagacgcctccaccgcagcggacgccgagctagctaatcggctcgcttcgacagcagcactcgagacagacggtcgtacttgtccggtgatcgattcaacggaagccgaagcagcgttgccgaccgaagccaaggtgttcgaggcttgcgatgctgcagcttgtccggtactcgagagcgagcttgcagcactagcgacgctgtctgtaacactagcagcagaggcagacgcagcactagcaatgctagaggcactgacctgagccgcataagcagcttgctcgactccttgagcgccgcgggcaacctgctctttagcataggcagtggcgtcagatgcagcttgggacgcgacatgaccagccgaggtcgctgaagcagaaacatctgatgcagcggaacggccagatccagatgccgctgaagctacagattggccagaggcagaaaccaccgaagcggctgattctacagaggctgaggcggcagttgcaacggatcgcacggacgcagtagcggcttgtccagcagcagatgcggcggacgctccagattggatagatgcagaggcatccgaggcaacggaacgaccagaagccgaaatgactgatgcgaccgactgagccgaggcggatgcgtcaccgaccaccgactggacggtcgcagaagcgaccgaggcggcggattgtccagagctggaggcaccagagacggccgaaaggccggagacggaagctcgagatgcagtagcctgagcctcgttgacaacagcttctgccgaagccttcgcagttgccgtcccggctcgaacggcttccccgacgttcttactagcgctggcggccgacgcagcagcttgagcggtagccctgccagccgtcttcctagcctctgagttggcgctggaagcggaagcctcgatattctttgtggctttctctcccactgcctgggctacagtgctactggccgaagctcgagcagagattgaggaagcggctccagccacgttgttcttgacagatgcagtggcatctttggcactcgcagtgacgctctcgacgttgtccttaacatcgtgatagagaccctttagtccgtttcggatgtcattaagcgagggagcgaggatcaaagatccgaggaagggggtgacacgattgacgtgttcccgtaccactggggcgtaagcgttcttcgaaagcgcactgacgtgaggctcgacgtgtgtacggtagtgcgggtggagcacagggtggacgtgtgtgttgaacaattgagtcaagtacctttaaaaggtttgaactattcatcagcaagaagatcaccagccttgacttgtcagccgactcacagcaccaattgcctgaggttgttctcggccaaatccaaagcgtgaacagcccccttggccacctgaggtactccagtcttcctggcccagtcatagctctgcgagctcttctgtccgccatagacaccagccttctcaaagtaagggactgaacgcttgtaaacgaggttcgcatgcttctgagcggtcgctacggtagggtggttgtagacgtcattgacggtcttgcgagctcgaaccacctgggggtgttgaagataaggcgaggccaaggcttcgatacgggcgtacaacaccaggagttgttgccaagcttgcctgccagccagctcggcttggttgacaattctgctgacggcggcgtggaggtgagggacgtatggctggatcgcccggttgtagattcgttgactacgatagtatatagccttcctctggttcctagtcttcaactcagctttctgataggcaggagcgagatgctccttaatgatgggatgagcctggatctgcgcgactctacgttgaacgtgggggacgacgtagggctcgaggacgtgacgacggtacgccgtggtaggctggcagatgtgacgctcccatgccggaacgttcgagtcggtggtggtgaacgggttgatgttgtttaggttgaaccatgacctagcggcgctcttgtcgatctgctcaggcgaggggcagaatgagagagagacaagcgagattgccaaaagtgataggataaacgtgttgagtatcgagtgagatggctttgaagctctagctcgctggatgttctaaacgattggtatgattagattttccggacaacaaattggctcggagctcttagcttactttgtcattcgcccttttcagcttctgtaaatctacaggagcaggcgccggactcttggcagtcactgcagtagtctgagcggtgttgccgcttcctttcggcacggtaggtccattctgaacatcgaaagggagaatcagcttgacatgatacttgggcaggaatttgctgacagactcacgtagaactttggttgttgagccgtggccgaaacggctggcttgacgccgccgctcttctgtcgtttcatggccattctcgctacgtctgtcgaagatggagccgagttcagtctgcttgtagatttgcagcggtaaacttatcggcgacgatgtacgaaatgatttcgatcgtgatcaagtcgcaagtcgcaagtcgtcgtgtgagcgaattgattctttgatgcaatgatgatgatggtcgtgattgcgtcaactgcgtcatcgtcgcgaggcgatccaccacaaaccgcgcgtcagcctgtcgaccgaaaagggcagtcgaggtcgatcgctacttgggcaaacggtattttcgtcaatgctcgatacattatatattagcggtctctacaacgaaaacacgttcgagacacatgacacgacgagaggagtacatgatgctggctgacgcagagacgcagagctagggcaaatgggaacaagtgtgcgtagcgatgcgtgtgaggattagtgcagcggagaagggggaaaatccgttgttggcgaacggatcatatgccaatgtagggctttgactttcgggagatacaaattgagagatttgtggtttggtggaaccgcctagagggagacatgcgatattgctgaggaaggtatgaacgtgtcttgtcgatgctggatgaagagctcgatttattgctgtcctttgggttgactgtccgccagggaagcaatgtgggcaaatggcggaagcgtcgtatacccgtcccgaccatcaggaggatcctgtagatatgttatcaggaataatggttgagtacggaacgattcaagcgagtagcgcatattatcggacgcaccattctgaaggtcgggttgactccgtccatgtggacgtcctgaccattatcccaatccttgtggatatcgtggatggaaggtagttgctgggtatgatggaccacctgctttcgtccgataccattgccagccgccacagcctgagcatagggatggttgtacggcgttgtgggcccgctgaccgagaccgagctggcatatcgtcccaggctcagactgctattgctgccgttgccgaacggattcctcgaaaccgcgccgggaagcgaggtataagactgattcaatcctgaaggatgcaccgtggcgtgtgcccggaaatccgaagccagctggcgatcgatcgaggtgctggattgcgcgaatgacgatgtagatcgggcgaatgatgacgccgaggccgctcgagggtcattggactgatacacgcggggcgatctggctggaccagggctgcggaaaaatctggtgtgagtgcccccacttctactaccaacagaaccgatgatcactcactcgctatcgatggtaccgacactgaggacactggcgttcctgtagcccgtgtggtcatccccgaactccatctttctagccttgaaccggtaagcatcgggaccggaaacctccatctgacgtctgtccgcttgggatggcgaaccagagtcgtgttgatttcttatagaaggctgggacctcgaacccgcggtcttgctggcacccatgtacggctcccgcttcgggatcaggtcctgagcgctctgactctttgagccatcggggttgggaatgcttgtctggctggtattgctcgtcctcatgctcgcagagtcgatcgtgctcagcgtcgtccactcgatctcggacttgctgttcggcctgttctcgacaagttgactccgcttggccatcacggctcgagctcgttccttttgcgcatcctccattgcttttcggcgagcgacttgcaattgcttatcctgctctttagcctgcttctccaactctttcttgacctttttcggatctgttccgttggccaagtctgcctgtgacatcatcgatctctcagccgcagtgactccggattgagtgcgcttgagcgcggccgagctgacagccgaagaggccacatttgcagcgggcggtgcatgaatttcggcttttgagtcgttcagactggaaaagaccgagctcaatccccacttcttctttttgccggtcgcagccaaattggttaagcgagaagtcgtattcgcgaacgcttgctggcggttctgatcttggttgggctgagatcggtagggatggttttcagcctgagcatttgccctttcgcggataggatgttcatcgaaggcgtcttgcataaccacatcgtaatcctctgggtgttgatggaaagagtcggtagaatccagacctcgttggctgtcaaaggagcctcgaggtgattgaccagatgctaaagctgttggggtcgacatatggggaggaaggaaactgcgctgatactgctggacaggcagcgagtcctgcgaataggacgcggttccagaattgctctgggtgaacgaagactgggaagcggcagcttcagcagctagcgacatagcctgcatacccactatatcggatgacctgcggtcattgccagatgggtgcggtacgggcgcagggcgttgttgccagtctggagcgttaccaggcgagagtgagcggtgaccataggtagacaggtcggctgtgggcagatccagctcgcgcaaagactccacgagcgccgatgcaccgttattgtaagacgaaagcgtcggtagcaaggtctgtgatgttgacgccgaattaccattgaggtttgggctgtcgtaccgccgaggtctttcaggtgaagcgtgataggatcgtgtgtgtggagaacatatgggaggaggcaatgtacggcctgagtctcggagattgtagtttgagggatcgtgagccggcgattgggaatgagtcggcggtatgctacggggcgggatggaagatgtgcgggacacgtcgtagattcgttgctgtcgctgctgctcgagattgtgcagaatgtcatccagttcggcgcgacccggttgacctcgcgaaaacgcaatttgagggagatctgcgttggcctgaagatgcggagtgaccagcttgaagtacctgtgctccagacattctgctgacgtgagacgatgcttgggattgtacctcagcaattgtctgatgcagtcgatcagagtagtcggcaccgccggcgaaaataacgaggcaaagacgatgggggggttctatggccaagaaaggcaacgtgagagatagctcgggagaaaacacggcgtgcaaattcgctcaccttcggaaagccgtatccaacattctttgccagtttcagaccgcgcacccattcacctcctccttgtcgaatgcccctttcgtcgtgtccataatcagagctggggtctcctaggatcgagttgatcctccagcactgatcaatctcgctctgtcctgggaacaatgctttgagattgagcagttcggccaggatggtacccaaggcccacatatcaacaggcgccgaatactccttggagcgcagcaaaacctctggtgcacggtaccaacgcgtcgagacatattcggtgtatggcggctttgactcgagcgctctcgctagaccgaaatcggcgagtttgacgatcacggtcacgtccttttccagcttaggagacggtctctcgggaggttgtttgccagcgttcaacagggccagatccgcaacggcgttttccgggtctacaaccggcaggtacgtctgtaatcctgtcgtggtaaccagaaggttctccggtttcaagtcccggtggaagtaaccgtgctgatgaatatggtgtagaccttccgcgacttgacggaagatactggcgatcaggcctgccgcgagattcctgcccttccgagactttgtcaattggtacaagtttccttccatgcattcaaagacaaagtagagctccttggtatccggctgaaggaaagcatcgtacaacgggataatggcagggtggtgcggaatctcccgtagagactgtcaaaacaagaaagagcaggagcatgagctactgctcgctccaggataggatttgttctctcgggctcgactcacaactagctctcctagctttgacgcctgtttccatccgccttcccaaaccctcttcatcctctttaccgccaccagtcgtttccccgtccattcaggtctggcgccggctccgcattgcatggcggacaggacggtcgttggcgcaagttccgacttccagtcgcacagccagactgttccaaaagatccatcaccgacgagcttgatcgctgtgtaatctcgaggttgatctgtacgtgacgcggtaagcaggcgtaagaatacacacaaggacatagtttgtagtcacttcactgcggcttacctggaggcaagattcctaatctcccgtcctcgtgtctcgttctgacctctcggtgttgccggacgtgtctccccctctcttgatctccgtcgacagccatgtctccacgttgcgtatggtagtcgctgtagtctgtcgggtcttcccgatgcatcccatctgccgggggacgatgcttgatcgaattcgctcttgtgtcatcctccagtccgtgacttggtaccagagtctgatgatgctgaaactgcatttgtgaatcgtgcagagattgatcgcccggacgtccttccccagagttgggccccgaaccgtctcctccgcctattaccacgttctccagcatctcgctaggggaagtgttgttcccgtagcgttgattgtccatctgtcgcctttgctgctcttgctgttgccgttgctgcatattctcccaagtggtcggtcccgggccggacccgcttacgggttgagaccgatcctggttgggcggactgggtgaatgatccgagtgatgcaagtgaggagacaactcgggagagatgacatgcggtgaaggcgaatgatcaccgccgatgggcccgagcatctggtcgttcggctctcggtaacgcaggacggcgggattccattgttgcgggttcagggtgttgccagacgagtggggttgtgtcatgccatgaggctgataggcgtcgatcatgatcaggccgggcagacgagaggcggatgatgtggtcgctcgggatccagatttgcccgcacagagtaaagcacctcgtcaccttgaactctggtttgcttcgagatgcgtttgtatgtgtaagagagatggtcttgcagctacgacgatgaatgctatgagagagtgtcggaaagagccagacgcccaggttgcccaggacaggaccgtggactgaaggtgatgcgatggtgtgattgttgcgttgagaggttgttcgcaattgttcgggaattgatgtcccctttgcgctcgattgcactttggacgggacggtcgatagaaagtggatctcgtatgtgcccgctgctacagagtgaggttgcaccaccgctaccgttagtttggctcactagtgcctgtcgagattacactagcaacagacccaaatcagagtaccaccgtggtcgcttcgggtcgccaagggcagggggaagcaaagcagcatacagcggaagaagattatcatcgacgttgtcgaaggatacaacaagcggcgagaaacactctgaggacctgtgacctggccggccgaacaacaggcaactcttgctcgaaatcgttcagcagccgggtgaggcagattcgttgaatcggtacggtgaaccatcatggtgcgtttcggccctgaaagtgagaggggggacgggcagtgcaacagcgggggaaaggggattctccccccctggcactgccgtcgggagtaatcgtttgcaagctaggcggaaggatcgtcgtcgccctcgctcgagcggcgagtcattcttgagaaacactatgtcgaccgcgactacacaaccaatcgattcaccgacacagtacacaggggcacatgtcgtaaatcgcagtccccgtgattcccgtaataaggatgaccacttgtttcgcgaacaaagaggtgtgtcggtgacgctctaccgggtatactcacccatcgcgataacccgaagtgggtcacgcctaactacgtgtccacgttgtgccattctaaccctacggcagctcggtcgacctgatctcagacaccagacggagcgactcgcttgttcgccgatgcaggtcgcagatttcgattgattcaggatgaaaaacatttcaccgaacaggccatgagctgcgtacgcgcgacgcggagggagccccctgaacctgaatatgtctcgaaaccttccctttcgctccggaagaaccggcagtcgtccccctcagccatgagtccgtctcgttccggcatatcccgcaccccgaatccccagagttttccagtcgtcatccgcctccggatggaacgagtcgttagcattgagaattgcatgagatcgtatctattcaataatcgataacgtcgacttcgaggtctggcagatggcagccttctttttccacctttcaagttgcggtgtaccatcgattcgcgctaatgggacccgaaggccactctcacgacgctagcgattagctcgttcaggcacgatgagagaactggcttgaatcgacttcggtcatcgacagcaagctggtcgctggtcgatcgaaactgtcaatatgtttccccgcatgacgagtgattggctgccattgctttggctcgatcgttcgtcgctgacctacgcccgatccgtgtattatacgccctggtgtggcttcaatcggggcgagtgggagaaggctgggcgaggtaccgacgaggttcgaaacaggaggaaaaagtcacccttccgcgtgcgtgcctcggcccacggtgggctgaatcttttcgccggaagaaaccatgccaagacgctcgctcgcgcatctatccgggtcgtttgggcacgagtatgaagcgggagcgaaagctatgttttgttcctgagagacttaaaacgacaatgctgagcaatgcgtcctccagcccgacgtgaagtggcagaatatagaaacggaatcttgtgagcggaaactgggcgcttcatctcgattcgaccgcgttgctgcgtgagagctagtcgagctagaagcttcgagaatggcaagcgcgagctgcattgagatgtctcgcagccttcatataaatgtcacgcgttgacctgcgccctcgcgcctcaagatccgaccactctgcagtatacacccatgtaaatgcatcacagcctgcttcgtttggcaaagtaacttatcaggtgtttgaggtcgatttaattaggagccagctcgtcccacatcccgcccaagcgtctagaaccgtttgggtcgcgtcgatggccacctcgacgggttcccagcgatcttgcacatcgccggtgcctaagcctaagttgccgtgttcgttccacccccatgtccatgttttgatgtctgcgccagaccctcgtgcgagtgcgagaagatgttcgcttccacaaacgaccttgacaattttcgcttcatcgcaattgcctgatattctccttacgccttgcaagccaatcgcacttgatgatttatactctgtaccgattcccggcccacctcggcctagttgcccgtgcgtgttggtgcccgttgaccatatccggtcagcttcctctgtcaggaagctcccgttccacgtacatgcgatgtgcgcccatctaggcgtgtccgatctcggcgcggcgaaacccagatcaagctgatgctttgcgttgctacccagccccaccacaatacagtcctcgcctgatatcgagcgcagtcggaaaagcacgtgacctgctccgacggccaaatcgtccaccacccaatctgatcctcgagcgggtttgccgctagtggcagaaaccacatccagctcgacggggcaggggtatgaagatggataggtgctctttttgagcctgattccgccgggagagcggacagcgatctcacttccgttgagtgatttgccaggtcgttctttcatggctaatcgtggttgtactggaggttggcgttttgccgacacagcggagcctttgcgcaaagcctcagagccttcaagcgataccccggcgaggacggccgtcttcacatcgagttgaccgtgacgtccggctccccacccgtagactacgctttggctacttccatccgtgtctgaaatccaatcgcaaatacaaaagaagtttcgatgtgaagctttgatctcgcggacggccagcctctcccctggacggcgagattcggggagcttgacgatatgcactcgacttcctccctgactagtatcagacgctgtatcccgttcgtcaccaaagccgagctccccgaaattgttgcttccgaacgagatcatcttgtctgacaactgtgaccacacgccatccggtccctgtcgcacgtgcccgaagcaaacaatgctcgtggaccacgagcaagcaatctttctcggcgaatatcgattcgtggtttcgatcggtaaaccagcggcttcaatgcaagacatatgatcgagttgtctccaactcgtatgtgaaggttcgttctcgcctgtcgcaaagcctgggcctagctggttgtattgattgctaccagtcgtccatagactcgtggcgttccagacgtccttgctctcgtttgtgtccagacttccgttcaataatagtactgaatggcctgctcctgacgcaatttgtgctacacttccagacagacttgacggaccatccatctggccaggtttggaggtcgaactcgaaaattggcaataggtatatgttgacacatcttcagcatgtccaatcccaagctgaccagacccattcgagccggaggctagaagccaagttctcgatgtcatgagcaagaagtaaatgtaccaatggaatccgaactagctctagtgttacgggaaagtagggagcgaatgatatagcatgttgtatcgcggttcaacactctcacgaatcatgacaatcgcttaaattccaggcagctagagacgtcatggcaaggcgaatttcgcggcctcgaccgagaatcaaaattgcttccgcggattcggctggaccctgtacaaggacatgctatgcagatatcggacgacaacgattcatagtctcgtagatgcactaaacgaccgctttggagctatccgtatcgggattccttactcataggggctgcgagctactctccaagttctcgctctagcaccttcgatcaacgggtatgaacgcgcggtgaagcttacattggggcagatcaaccggtcgtcttcatcatgtcctccactcccaatccatcatctcaagctccattgaagccgatgaggcgagacagggaacctgggcagcctttgagatcagtcaaagtacaggaaccacacgtccctgcggcagaaatgatcggcaccggtaaagatggaaaggaaagggtagctaaagtgctccagctgagctctttcgaggtgagcctggccttccgaactcttaccgttgcttcccgggaaggctgacgagggtattttgcagcgcaatttcaatgtggagaactttattggagaccttagtgataagctcattgcttcctccaaggccgacacaggcggtatgtcgcttgaggctccgcaagctggatgctcaagctgaaactgagtcggttcgccaaattgtcctcagctctggacccccttctcttcatctcctcattctctcctgctcttgatcacctcctctctctgcagaaatctgtctcgagaaagacgaaagatctcgagggcgaagtccgagaggcagaacggtcgtgtgaaggtcgcctaagagagatcgatgggggattcgaggtgggtcgatttgctagtcctgaccaacggttttcgttactcatctcaattccgacgatagaccatcggaagctcttttacagctttggagaccaaaatcaccggggttggccggacagctgttaggataggttcgtggagcgaggccaacggtacgaccatttatgacgcgccgagactcaccgaaaccctttcacgatcaggcgaacagatggaatctctgcacaatcttcgatccgttgcgcaatctgcttccctcattctctcgtactacctgtcactagcccagccgccggcaccgattgcacccgatggagtcgatgccgatggcaaccctgtcccgggcgaggcgcctcagaccccattggatacgctctttgccaccaggacttcgcgagaaggtcgagcacgactcgccatcatccttcgacgattaagcactcttgccaaagacgtcgtcgagaatgcttcggctgcagcttcgaacgcccaagataacgctcgcgagaacgacgaagacaaggaacggttgatcaagctgagagctgatgcggacaaggccatacggatacgggacgagattgaaaagtatgctgaacgtttcgaaaaggagtgcctaagactctttgaccgtagctacaggaagggcgatgtccgaatgatggcggtgggtcgaaggacgaaatgaatccttgtgctgatggagtctagctcacactctcttttcgtgtttaagcattgcgccaagattttgcaagacttcaacaactgcacttcgtgcatccagatgtacgtcaatcagcacgacttcttcatctcgaaggacaaggttctggaagaagcatcaggattgaatccggatggcacaccgcgcgtagactctgcgcctgtcgaggacatgtacgcagttcgagcagtcgctctatctcgaatgtgaacttatttcccttgtttttgcagctgggcgacgttgaacgactcaaataaacctgcccctacagccgaaccaggactcacagcgttgtcaaaggagattcgatcaacggtggaccaggaggcgcagatcatccaggcagtgttcccgatgaaagaggatgtcatgagggttttcttacagcgagttttcgcgcaagtagtgagtgtctttgaccgacttcatgcttcaccattgcttagcttgcggcggtgtagatccaacaacacttagagacgctgtttgcacgcgctgctgtccttggtacactcgctttgttgagaatgttgcgtctgacacacagccagtgctcggcccttatcgaggatctcaaacagtacgacttttcgggctttgggggagaagccaacacgaccatctcggtcacgaccgatcgacgcacaggaatcagtacgacggtaacgctcgcttcgatgctagactctgctatggaagagatgtttagtcaatacatcgaagggggtcgctatctcgaactggagggcaagtggatggctatcgcctataaggatctcgctcacaagtatcagcgattccacgtaagcgattagctaccaaggcaattggttcgggttcccaccctgacaagggtcttgtctcttctaggaaaatcaaatcaagtctaaacccggcaatctgcttgatcgggtcgtggacaaactgtcaacgactggagggggcagcggtgtcgcgccgaatgcaccatcagctacaacttccgccacttcggcggcagcggcttggctgcaccgctatggcggcaacgctctcaccggggtgacaggatcgaaagatattactcgcgctggtacacccgtgcagtcgggtgcttcttcccctgttgtcacgaggcatactgctggacaccagggccatcccaatggtaccgaaggtttgaaccaagaagacggcgccatcaaattagatgttgtcgaaaaattcctccgaatacatgcagaggccgtgggtaggattgtcgaattgagtgtaggaggcgaaacgtatgtggggactggctccacaggtatgaatgaatctaacattatcttgacagggcacaaaatgcggcgaaactagcaaaattgcttgcggatgatatcggtggggactatctcgagctagccttggagagcgcctcatcgaaactcgacggacaagatcgtgtcgagcccgaccttgcgatcctggggcagattcaccaggtggaccttgcacttcacctgtggcagacctattattcgactgtgttggtccctcttgtcagctcctcccccgcagtccgtcgagacgcattaagatggaatgcgaatacggttacgagggtggaaggcaaggtcaataagcttgtacttcgattcctggacggtaagtctctcgatcagcaaacttcacatgacattccttatggacttttgctcccctgcagcttcggtgtcctggttatcagtcttgctaaaaaggcagaagaacagcgatttcaaaccgaaagacgaggaaatgtcatttgcgcgcacaacgaccgaaccatgcacgctttgctgcagtttcctggagcgtctcaatgaggcgggtcacaaggcatttacaggaaagaatgcagaggctttcttcaccgagctcggtgtcgaattccatgcgtaagtctgtaatcgcagacacaatggcgagaatgccaactgatctctcgtcaacccagattgctcttggatcattacaagcggttccccgtgaatccgacgggaggtcttatgctcactaagtaagccgctctgcaggattcgtggaagagattttcatctgatgacaagcgccattccaaagggatctcgcgacatatcaagactcgattaaaacatttggtatcccggtgctcaatgatcgatttgacatgcttcgtcaacttggcaacagcttcatcgtgcaaccagacgtcttaaaatcttatttgacggaaggacacctcgggaggattgatgcccgcttgttacgcccgtatcttcagcaacgttccgattggtcaactttcgcaaagcaattcggcgaggaagaagcctttgccgagaagacggaacaagacgtcgtcgccgccacaacaaacggacttctgaaagccagtcgatattcgatgggagtaggagcggctggaatgagtaaactcaaggatatgctgaaggccgtcgacgaccatgcctttggagacacattacctgcgcagcaataccggacaccgggggcccatcgaggtctcaatcgcgcgccttcttatcggaattatcctgcaaaccaaggtttctttgttccctagccttgggatccctttgtacagacagcgttacgaaacattattccgtggatcggaaatgtatcgcatctccaaacgtgtccttgtcgatatggctcacttcagccctaagtctttacaagaagaacgtgttgaagccaagaccggtgatcgtgaccgaatcaaggttccccggaagcaaattcattgacatctcatcgctgatcgcttgagaccgttcccgcaatcagttaccccctccggctgcttccatcaaccatatcctgcctgtcgtatcgccttgccaactcccggccgatacagacctctgtatttccgaacgacagaggacgttcttttcgtttacagtaacatggatctcgccgaggaagagaagcttggtaaccacggtggtcgctcatctatcgacgaacctcttcttccccctcaatatgaggagaggccgtccaggttacagtcccctcttggacagagcaggtctgtcgcagatgatgtagaacggatggtgaagaccaagaggaagcgtgttggtaaaggtcgattctggacgatccttttcgtagcattgatgggcccagctcttattggagcctttggaatcttcttctcgagctcttattacggggacggctggatttcgaatcgaccacacgccgatgcaggatcgtttcctactgagtaagacttgcgcatgtgtgtctattcatcgtgctgcaagctgactaaagacgtttcagtatcggatatgctggtcccacaattacaggtaaagagtaagtcgattcgagagtcagcactagcaacctgaactgattccttgttaatgttcagggctggtctcctcctcactgcacctgctcctcctatgcatactgctcagcctcctctagtggctcctcaagttggcggaaagaaacaccctttcaatatcatgcaatcttggggtcatctttcgccttggtattcagtcgacagtcatggactaccgaagacgaacagcttggaacctaagggctgcaagatcaaaggtctacactggctgcagaggcatggtgctaggtaggtgagcctgagttcagcagtttcgggggaaatggctgattggcattcatcgatcgcactgaacagataccccacgaccgataccatcgaaggtgattagatttcctgctgtgtccccaaacatggaactcattgagggatatcgccataggtcctatgggtctcgcaatcagactgaagaactccaactggactgcttcgggtgaccttgatttcctcaacgagtggtcctacaaattgggcggcgagatcctcactcctttcggtcgacaacagctctgttagtgacagcaaggcgacacagatcagtcccgcacatgctgatatttcttcttaccgtgaaagtcaacttgggggtttccgctcgagtcaaatatgggttcctcatggagcagttcgaggaccgtctgccggtattccgaacggaaagtcaggagtaagtttgctgtacacatatgcaataattctcatcactaacggagttatcattaaactcattcagccgcatgctcaaatccgctcagaacttcgctgcaggtgcgtctgctcggatgaaatacactcctcgcgagcctggctgatgatgcaaacgggcttcaggcttcttcggaatccctgtcgaggatcagtacaaccttgccgtcatgatcgagagctctggatacaattgtactctatcgccctatgccatcgtaagtcacggtcgactcaacaagcttcctacctgccccgctgaatttcccgaacagtgctcaagcgacaacggtaaacttggagccatcgccggagcgaagacacaagcttgggagaatgttttccttgcaaaggctattaaaaggctacaacccttgatcgcaggttactcacttaccacgcgagacgtaaaagacttcatggaggtgcgtgaggccggaaatcaagcatccggatcagactgaatttatcctggacttacagatgtgcgcgtacgagactgtatctgttgggttttccgctttctgcaacttgttcacggaggatgaatggaaagggttccaatacaggtgagctcaacagcgtatcatcgattgattcctactgattatgcgcctgtctatgcgtcaggaacgatatctggtggtggcataccagcggcttcggctcacccgtcgccagagcggaaggattgggttatgctcaagaactgatttcgcgcttgacgcacagtatgtcctggagcaaccctactcactcgtccgagggatcgatattgatctttgtcttggtagcccgcttgaccgagttcaactccactacgaacagctcctggcacgatgacatccatttccctctgaatgaccccatgtaagccacaaggtctcagatctctgacagtttcagcacttatacgctatctatagctacgtcgatttcacgcacgacaccgtgttccacgatgttgtcactgtgctgaactttaccggattcgctgcaagcggcacaccgcctacggaccatatcccaaagcaccggtcttacatctcttccaagtcagtgcaaacaacaccgatctctgaagcgctcaaccactgaccacgacaatttccaagtaggatctcgcctttcgctacgaacatgcagttccaagtcttgtcttgtccctcggaggcatatgacatcgatgtcgaaggggaagagtcgcgaaaatcagacgagtacatcagggtcatcctcaacgatgccgcagtaccgcttactggcatccgaggatgcccggagaatgacgacggtaaatgccccatggccacctttacgtcgtctatccaggagattatcggcagcatcgattttgcaaaggaatgtctcggcgagggcgtggagatcgactacagcgcagagacaaccacgggttctccagtgtatctgaaccaatgataggtcctcgtcaagctttgtctttatagaggtggttagccattgacagttcggataaggacactacatctctatgaatatttacttacggcttgatgatgaattcgatcgcggcagctagaagcgcgcgattcattaagcgcgcatgaatcgacagttcctgagcagaatatggtgataggattcgactcgactctagtgacatttcgattacagatcggcttgcattgattagacatacacaatggcatccaccttgaggactttcacgtcggcgctgaggcttgctctgcccgtagcccggccgctttcggcacgatccggcgttcgggccatcccgagcggacccagcagcagtcgatgggctagcaccagcactgattctggtaatcacggaccttacttgactttgggagagctggcgaacaacaaaggtgccacgaagcaggtaattcgatgcggtacgatgttaacgtcacggatcgggagctgatggttgttcatggacatagcacgtgcggttaggacgaggatggtcatctacgaaaggaggcacttcaggacgaggtcacaagggtcagaaggctcgtgctgggaacggaaagcccaaggccggtttcgaaggaggacagactcctatcacccgattgtttcccaagcgaggtttcaacaacttgtgagtgcgatgatggtcgtccggcggcttgtgagtcgatgctgaactcggatgcctttgcagtacatcgaaaaagtacgcacctgtcaacctttccgcgcttcagtcctgggtcgcatcagggcgattggacgcatcacaagaaatcgatgtgggcttgatcttccggagcaacctcgttcacgggatcaagggatggagcggtgtcaagctgctcggagaggtgagccacctttgtactggtggacgaaaagatcaaatatgaacctcacgagctcatcttgaacgatttttaaggctgatcctgcgctaccgctgccacctcttaccctccggctatcgcgatattccaaatcggcagccaaagcgatcacggatgccggtggagatgtcacagcggtgtaccacaaccccctagctctgagacaggcggctcacccggagaagttcgtcggacgagaggtgaaggaagccaagcctgtcaggaagactgatattcgtgagtcctgcgccatgactaacgacgtgatattgcctcggctgacactatcgtgataagtctattactccaacccggctaagcacggatacttggttaaagatgcccctgctgtcgaagctcaatcgacatcagcatgatattttgagaccacaatgccattacgacgtcacgttaacaagaacaacattctgctaggttcatgtgacaagtctcagtctgctggaatcccgagcactataatcccaggtataatgccagggggttgttggcgaccgcttcacgatgattgcgaaactatacgtcagatgctgcgacaagcaataccccgcgtatgtcgggactgtttcctgatagcgactttgcgctttcgagcgctggaccaggagactgcgtgagaggcgctcccacgagccttgccgagcgctataggtcgtttcgttttgtccggcaggcaacgctgagtgaattgagcatgattaagatcgagctcgatggcatggatgtaaggcgcgtaacacgaacctcattggaggtggctcgctccgggcgatcgatcgctctgccatcagcggttcgttccaaaacttccctggggatgggtttgccctgctcgtagtgttgcgagtcaaggatgattgaagtcatgagatccgcgacgtcgccgttctcccagtaagcgacgacgagaaacctggcaagcatgttctggatttgcgcaatgaaggacacatgtaccggaacatcgagatatatgccgctggattttgaagcgccgtcagggacaaagtcgtgctaaggaatcgatgaccagctctaagcgcctgtgttgagcatagctttccggacgtgacgggcttacagtcacatagacaggttcatcgcctggttcttcctttacatcgagcggagcgccgcactgatccgtatgatacgccagagcgggcaccggaccggacctttcggtctgaaactgttcgggccgcttggccgtgagacccttcggtgagaacatttgtcagcaacccaagtgtcaagcgcatcaaggaagttggtactgctcactttgcgtgcgcaaagaggctgcgccattccgtgaaaggtgagtgctagggggatcgtcagcagtgacaaaagcttcataatggcgcaaggagctgagcctcaagatgaatggtggcgctgaaatgacactggtcgttgccagaggtgagcactcaaacagcgatcgacacgacacaccgaacgctgtacttgcaagggaaaagcccgacaaattgctggttcgtctgattgatatgtctgatgtacctgcgtgccacaaccgtgaattcgggctgagtagggtggtgaagtggtttcccggtcttgcttcttgaagcagtgaaaacgcgaatgaaaaggcgattttgatactggagaggaggcaatacagaacggcgtggaactatcttcggcatgtctctgataggatattcactagaagtagtacaagtgtgttgtcgacaaagtctgactggccaccagcccagatcgtttcgtttaagcgcgcgcggttcgtactcgagtgcgcaccgactcgcagtggaagatgcctcgaccacatctgaggaatccgccagtgatcgatcgcctcgcaagctctgatgacgtctatcgatcgactattacaaaatgggcccgtacaccacgaggattatgatacgcaatgtacaaaaaacaggaatatggccgaaatcgaaaagaaaaacgaagaaacccaagccacgcaatggagaaccaccagccaaacgcgagcatccctggctgagctcattcttcgtcgtcctgcgtcatcgtctcgcgaagattggcccaaaacgcgatggcctcggtcatgggcatctctagtgactgcttgaagacgcccagtgactctacgaacgcctgatcctcgagctccaggtcgagcgggacgtagcgcatgaccttgttgtagatccatgagcctggtttcgctgggtctggggaagccttcttgaacgtcttgagcttgaaactcatgcctgcagatgattacggcgggatgaaagacctatcagtctctctttagcgtagcgttacgcgttccgttaattgactcactcctcccgtcgaccgtttggatgcatacgaacgtgacttcctcgccatttccgcccttgacaatgttgaccttgggtaccatcaaattggtcagatcctcgtaaagcttgatgatctgttcgttctgttcccgatctgccgccacatccttggcagaagtgttgacggccggcgatttggtcatttttgacatggccgccgcctgtttctgggactcggccaaggcagccttggaaattttgatctcttgctgcaagtcctgcgtcaacgtgtcgactgacgtatagaaagccgatactgggataagcactcgctctgggaattagccaccgcgccctagctcgtgagactcactctgagtttgcttctcttcgactttgcccttgtacatgttgacctggctcttccactccttgacctcgtcttccagctttttcagatcaggcggcaacggggccgcaggcggtaccgctcttgccttttctagctcgacctgcaattccttcttttcccgctccagcttctctgtccgtgccttttctgtgcgaagctgctcctcattggtgccagaaaattgcttgagatcgcctagcgatttttccagggtcacgacctgcgagttgagcttttcattaagctgttcgagggtctcgatgatggtatcctgcgctgttgatcggaaaaggaaaacccgtatcaatgaaaagcagcacgacactgaacgcggacccgagggatcgcctacctttcgcttgatccgaactcttctccttcaacttgtcatacagcttttccatgtctccacccttcttcatttcgagctctttgaagcgtttttccagagcatcccgttcttcagtccggcgtgctagttgagacttgatctggaaagtacggtcaaagcagtggggtcagccacggtcagagacggaacacgctagagtggctcggctgacctgtgtcaactggttctctaggtcctggtccccgctcgtcatgttatcgtctccttgtgacaaaccgactccctttcccttggttgctttcgattccgggatcggcttgcttgtcgacgtgtccctgcctgtcgctcgtttcggtcgacctgctcgtacaggctcgggctcctccatgaccacgtcctcgtcggcattgtcgtcggcagagtgaatgtccgcttcgatatcgatcacctcaggctcgtcctcgtcattctcctcatcctcctcgttcacactttctaccaccgcagaacgtcctttcgtacgtgtagcagcggctttccctcgaccccgagcggcaccgcctctggctgctgttgacgctttcgtcgatttagaactggaagctgacgttggtttcattgcagtaggctttcgtttagccgtgctggagctcgccgtcggtttcttggtcgcacgcatgctcatctcctcagagccgtagcctgtagatgatgcaaacgaggtcaatgccggatcgagcgatgataggtctgaaagggaagggatactcgcctccgaaatcgtcatcttcgtccatgttctgcagctaccggctggttgtcaatttgttaggtcttaccgtggcaagtagttgaactacgtcgtaggtacttgctacttgttacgaacagtaatatggtatgattctgattctgatgatgttggatggatggatggtgaaatgaacatctacgttttctgatttgtttacgttttcgagaatcaagcaagcgctgatgagaagtgaagtgacttcggaagtaaattccatgcgcttctaccgagcttgcaccctgaatgccccaccggaagtaaatcgatcacctccccctcgagaggcacagaccgcgcgcgcgaacaattgatcaaaatgatgggagtcggtgtgagcgtcgggaggaaacgtaatttacgccatcaaacagtgagcacaggggagcgcgaagtgaggtgaacgccgtgacgcgtgacgtaagggaggaggtccgtcgtggtgtaaccggcggcgggaaggtttccgacgtccacagagtgatcgagaccgaggccgagggaggggagatcgtcggatgattgtcgcagcgtaatatcgtaggtcgagtggtcgaaatgtagattgccagtagtaacggtgaggttggtggtgggtcgacgagtcaacgagtagcagatccaaagggagagacaagaacaagacatgtatttttgtcagcttcgatgtgatttacgcttgcaagcgacgagatcgagacggaaaccaagcgcacagagtttagggtcacggtgtaatctcgctatctgcgcaatttgacgtcgatggatagccggagttctggactgttcttttcgttcggtcgagtcaatatcgtggtatcgcttcttttgtagtccagctagaacatgccccgtgtgtatggacagtcgggcaaatgtagaagtgcgaggtggtgcgaatggcaaaaacgtatgacgtgacgtctcgaagcgaaactgatccttcaagcgaacctcccagtggatgcgttttccgcttccaccctatccgcgatatctatatcttctcctcgaccgcttccacctcccctggatatctgggaattacgaccgcgactaccggaacctctcgcgaagacgatcggatcctgaaccccagcgccaggaaatcccatcgacgagagcgcgcacgtatcacatccattgtgctatcatcgcaagccgtcgtcgcatcgtctccggttcgtcacccttcgctcgtactcgcggcacttctccctccgaacagatcgagacgtcccctgaaccttctctcaagccctagagctggcagtcggtgtccgccgaggcttgccggctccttggggctcgaaactcaatttcatcgatccttcgccctagccacgaatggtgggaggagggagatctgagaccggccggcacttgcggttgaggaaggacccatatggcacggctcggtaaacgcgcccaaaaggtctgtcggtgagattcccttcccctctggttcgacgcccccgcatccttccatcgcgctcgcgtttcgtcaggtcaggctcatcggctgacggtcggaagttccggtgcaaaaggaaaagagaagagcaagagaaggacgagtagtaccgcatcgcgacgccccttagctcctccgacgacatgcatacgtttccccctgcccgagaaccgtcgcagcgtgactgtgaacgccgaaacgcgccatggctccgttcccaacccacccgcggccaggcccgaggttccccttttgcgcgcgcgagtagcggggcaggcattcgcccttttgtcgggtttgcccaggcgtgccaaccatcgactcggagggagaccagcggtgacaaatgacgccaaccctttttgcgatgctcgaccacagcacgaaacggaattgacaagaaggggagcgggcagagagacagcgagaaagaagcaagggaccaatgacttaccgttcaaggtaccttgataagaacaactcgaggccaaaggcgtagatcgacgagggagatcttgatggatcgaccacgtctgcgggaggaacaagggcaaagagatgaaatttacatggttagttgctcattcgacaccactaccgcacagatcgatggaccgacgtcgtccccggcactaggcatcggggtggaaggagaagggttcaaaagagtcgaggagggtatcaatcggtggatctcgttcgaacccgtttcaaccaccgttcgcgctggccgatggcttcggagacgtcccgcgatagagattgcatttcatctcgttcatcttccggagtcttttcatttgaggtgtgtgggaattgcgggaaggaccggccaccttcgacatcgatcttcatcgactggtcgtatcgatcgagagcatgtcggttaatctctccttctcgcccgatggacttgcccaaacttccgaaacacgctcggacattcgactcctacccaaacctccggagcgcaccggagctgtatcgagatgtgaccaccccaaatctcgcgtctgtctgtttgtgacacttgttgccgggcaggcgagagccgcgggcttgcttgtcgctttttggcgtgggaaaatccgggcgtgtgccaggccataggaggtacacgattactcgcgatcgtcgaatgctatcctttttttgtcccgggtgacaccccctcgcggtccctcgcactggcgctttcgaccagaccagggattttgggtagtcaccatccggctgcgtaacccgcgcgtcgatcactatctggtatgatatatcacctgttttcgcgtcttgcacagcttgcatccgccgagtctcgctcatcaggtacacagatgccccgaaatcgatatcgtatcgcgtatcgccgttttgcgttaccgccctcgttgagctgaaatacccgcgggttgcggacaactgtgcgtccgaacaacccaccgaacgctgattcaccaacacgccctcattcctcataccacgaaccccaaaaccataaacataacgtttgtaactcacggaatagtcaagtccgaggttgtccttggtggatctggatgtgtcaggaaaggtgcaagcgaggagagtccttgagaggtagaaaggtaataacgcattcagggcacatgaaagaagagtaccatgtcagtatcgatggcgttgaaatcttggttagcaggcacaccgcgtcgatgaactcgtcatcggtcggacatgggcactcaccgataataacaatgttacacacccccaggcctgccggagaagacgatgggtcgatccaaaggtacttcgagtgcgtgacgtggcggggagataatatcaagaggtcctttcgactattttgatacggtacgaaggtggaggtcgaacggcggtagtgtggttgtcggtctttgagaagtctgaggtcgaagctgttcgagtcgttcgaaatggcccaacttgagggtacgagcggggtgtccttcttgctttctatatagctcctgctttcgagtggagcctggctcgttggagcaccgacctcgtgcgtgcgtccttctctccggatttgttgttcttggctccagtcggtctgattggggtttcgggttcaggaaagacgggtggattgcctttcgatcgtccatcaactcacagtggtcttccacccttgggagcgatcaaaagggcgaaatcgcttcggaagcgtggaacgcgacgatctgcaaaggaaatacgatctgcgtcccggaaaagacgtccgtgccgatcggtcgcatggcacaaagcacaagaagagagggcatgtcggtgatgaaggcgtttcagagtgcatcaggataagctcaccatggaccaaagatgtaccatgtgccggcgttgattggtcgggatccaggtgcgtcccagagagggcgttgagaagcgtcatcacgttcggatgatggccgtagtcgagagtatcgcacgcgcgcgggggagagagcgggcacgacacggcgcgcaggattcgtatggaaaacgtttcaggttgagtcgagccaggcgagtgttgatcatcatcatcaccgaacgttcgatcgaaaggaggagggcgaagtccatggacggagcgtgtgaccatgcgatcatccgaacgttcggcatcgggcatgaccgggagggttcggcgggatcggcccgagtgggaagaaacccaggttgtcgcgaaccggattgatgaggtgagccaggtcgcgaaagagttggagtgcccaagaagatcgtcgagggccggtatgggtcgatagaatatgaacgaatgaggacgaggaaattgaggtagaacgcatcgagtcagcatgtggtctacaaacattattgtcttcgattcgacgtcgctgcacatgaccgtggtgtcgagcacagcacattcacaagtcgcaacgtgtgaccgtttacgtaactctctcgccctctctctctcttcccctcgaatccatatagaccgagacgattcaaactgaagagacatgataatgacgagactcaccgagtctgtacgtgcctcgggccgataactcgactcgtgcttgatcttgaagaaagagggagctgattgcaagaggggcgactactgaacggactatagtctagagcagactccaaattcggtggagtcggagcaggtcgggagagtattgcgttaaaagttgtttgcgttttccgttagctttttccgggagctcgtgtgcctatcgtcaagaaagatcgtctacgtccagcgttatctttaaatggtcgggcgctggtgataatctaggtgagggtcgagtcggggcgtagcgtagcgttgcgttgctgggagaggggtcgtaaaaagatcgtcgagaaagggcgtcttcgtaccgggtcaacgtggagtctgaaccgcggttgatcgggaaagaggtcgtactggtcgtgggtcatggacgtcgtcgatgtcgtggtcgtgggtgccgggcttcagttggcgtggtcggggaggctctaagtcgggaagcaggtcgggggtcgatgaagagaaagaggtcctcgtgagccggacaggtcgtcaaagtcccagatggtgatcgtgggtggcttcccaaggaaattttctagctcgggtacgtatgtaaccgatcgatcccacatgtcatatcaccctcctctctccgacgtatcatgtcaccaaacttcggtcataccatcaactccgagtaatctagaaggtgaggagggaaaaagtacgacgtgacgtttcgtgggtcgatccttctagatgtcacccctccctttctcacacgccccaggaatgacgagacgcgagacggtggtgagatgagctcctgatctcctgatgccgacaggctgtgccacattgccctcgttctgtgactcgacgggatctgatcaagcctatggacgtaaaggagggtggacacccagagtgaatgatgaaacgctccacacacaaacacagcgcaaatgttccactcggatggctcggactcgaaagtctaaaacccaggtcgaggaggacgacaacgacgacgacgacgacgacgacgacgacgacgacgcacggacgatggattaaaccccccgatcacatcaagatacgggcttagccgcaattcgatctagccatcattttgatctacacgatacaaaggtatgttgccccgttcaagcgagaccgaagcgctcggtggatccctttgcgatcgagcatgcgaggggagtgatcgcttataccccgaccctcctttgacgacgagcgggctggagtgaatggacaccgagagattcaccggatcacaagctgggctcgctcgtataagactgaacctctctgcctggatgatgaaacgcctttgggcccccctgaaccttaaacgagaggggacgggagatgaggaaaggacctttctgacctccttacctcttgttccgttctcacacggtttgtaaccgagcgcgggtcttcccacgtcgacccggaccgatcagtcttcggcaatgtggtcgacgttggagacaacggacgtttctggttctcctccattatcatgcagtggacgacgttcgggcgattaaaagtcaaggaaatgcgattgtactttccttgattcggtccaagtgtaatcacctcaaagggagctacaccttcagacgcgatcatcatggggcattgtgaaacaccaagtggccgtgggaaagaggcgggaaggagaagggaagcgtgaggtctgatctcgagtatggacggtcgtgatcgagaatcggggatcacaaattactcttctacagaccagtcagtcacccagacatactgctgtacccttagaggatattggtgtacttattgggccagggagacggagacgatgtcgagggagagaaacttgaacgttgaagagtgtctctggctgtgctggctgcttacgagggggaaacgatgatgagattccttggcacgcgggcactgtgcacagaaaccgctggagtttctcgcgtgctcgtggctggcgtggagccagtgataacggcagagcccggcagagaggtggggggcgaggcgagagaggcggcggaagagtagcagcagctgcaggaaaggcgcagagagagcgagagggagacatcgcgagatcgacgttggttcgggcaaagagagacgtcgacgacgacaggcaggcgacatgatatggtcaagattgggtcgtcatgaagcagcgtagagttccatcaatccttcaattcatcaacctgccacaacccaccatctaggtacaaggtcgtggtcttcaatagaatctagctcctcgatcgagacaagacttcaacacattcccatcagccatcagccgacccacggcgcatcagcttgatcagaccactcaacccgtcgagcttacacctttgcctcgaccacgcacgcaccttcgaactggactacatacccatcaacctccacccggctgagcatcaagcgatgagaggctcgaccccttctctaggtcggacgagatccagctcgaacgcacgtccgaaccatatcccgctcccaccgaacaatacgggcagtaatggcactgccaacggaggtgccggtgggttcttcaatcgctcgtccggtcccgggacacctaccagcccgaacggtcagccgtttggtacgagcagcagtaataacgggaataacagcataccagggaacggcatgtcccgaggtccgagtaacggggatgccccgctagccagtccttcgagtcctcggaacagctttctccccagtttcatgcagaggagcagaccgaggagctcgacgttgacccggttggggagccatcagaattcgggaggcaactctggcggtggtgcgaataccgcagcggggggtgcggcgggaggagcgttagggtcagggtcagggtcgaggccggtctcgagcagggcggcgtcgacgaacgatctggggaggagcgtcagtcagcctcctgtaggaagtgcaggtaagtgttgatacgttccaggtcgccctcccacccatctctcacaggaacagctcgactgacatgtcatcggtatgctttcgcgatcacagccgaggagccccctactccatcatcgaactcgaactcgaactctccagcgacataccgtatccgcctggtgccccaccttgaaacctaccgctcggtgcactttgaacccgtcgtccgcgatctgaaaccgtgcgacgattccgacaacctgaccggccgggggacggtcgtcaagatcggtcgattcaccgaacgagctcaacaggctcaagagacgtcggcttcgaccggagtcacacagagcgagacgatcagcacgtttggcgcatggggaggtgcgggtgcaggtggggatgtcaccgccccgtctgctagggataccgctggggatttcggaggacaggcgaggatggtcaacggggccaatacttcggggacgggaacgacgggggcgggtggtggagggtcgttgacgagcaacaaggtggctttcaggagcaaggtcgtcagtcgggctcatgcagaattttgggtcgaggccggcggtcaggtgaggagacgttccccttgtgtatgcgtatccgagtgatcacgagctgacgttcgacatggactgtataccaactcggacgggagcagttcttcattagggatacccattcgtcttccgggacgttcttgaatcacatcaggttgtccaacccgacgcatgaatctaggccgttcagcatcaaggtcggttcactgaatgtgtcagttggcgagacgtcgagacgatgactaaccagtgacgatcgatccgtcgacgcttgcaggatggagatatcattcaactcggtgtagactaccagggtgggactgaggagatgtatcgttgcatcaagatgaaggtcgaggtcggtcgagagaaacgcggacagaccaacttcaagcaagtcatcctgctcgtatctcttgtcaaatgcgaatcggcgagctcatttccttccccccgtttgactatcctcatcatcttagcaaggaagccatgaaacagttgaaagccctcggaggtgtaccggaaacgccgacgagcgcaaatacgcctaacggcaagagcaaggtcgcactcaaggcgagcgtgacggattgttgcatctgcttattctcagtgaccgtctgtcaagcattgttcattgcgtgagtagagcggagatgaggaccgacatgtttgtataggtgctgatttggtattgttggggtggtccggcaggccttgctcgcatgtggtgagtcgagtctggcacttcacgtcagacgggcaaaggtctaactcgatttggattcctggtagtttcattacaagtgcattcgaccgatccttgaagtgcaccaccccggattctcgtgcccactttgcgtaagcagtcgtcgtatgggacgctttcggcgactcgagctgaccagcctgttcacagcgtaccttccacgacctggatgccgatgtcgaattggaagacgcatgggaagtggcttcaaggagggcttcggtggctacgggtcgacgagtctcccaggcagagggcgcgaatgaagaggccgtaccgctcgcccctgccatgcccgtcatcacggcgccggaagacacgcccatgacgagctccaacggacaggacatcagtgtcgaggagaactctgccgcgagcgacgtgcctcccagtccggcctcggctcgaccgaacatgtcgctaggcgccttgccgattccgactctgggtgggcctgcgtccaatggcaacccagactatgccggactggacgctgcgacgccgatgaacaataccttcctttccaccttggccgacttgccgaacccacccgactcggaacctcgacgtccgcttgacaatgtcgccgaggacgagcccgccgagactgaactcgacgagaccaacagcagggtggaagcgctctacacatgattcttctcaagctcttgcagttccgttcgcatgccccgactttgtagatcgaattacccgcataccctcgtccgtgcctcgtaccctatagaggcgatctgtacaacatttcgagacataggtttttccaaacacattctgttcgcatgtcatcaacgctctttggttgttccagcaacatttcgccaagacgcgcgcggggaacgtccacgaatctcgtcgaactcgatcttgaacgcatcatctcatctagcatctagacagaactcggtgtacataagtagccgctggcattgatagaagggaccaccaaccaacccatagctcagacgtaggacatcgtctcaggctggctcacatcacatctcttgacgcaaggcctcactgacagtacgaaactaaacgccgggcagcacagaccaaattccgatcacaaaaggctcagcagtcagcgatgaagggcttgcggaatatcatcttaggctccttacttttgctaggaggagccgcacgagcagaagaggaggaggaagatgatggcgagagagtgagcttgagctcgactgacggagaacccgaggatgacatgactcaaacggtgtttctgtactctacagctcatagcgatgcggacgcatgtcctatatcctccatatgttgaccaggagctgcaggtaagcgctggtccgagattgagcatttagcgctgtcactgagcgtctttcatttgcttcaacagaatcgatggtaggctggcccctcccggcatcatctgctgggttcgttccaaccgcaaactaactcgctcctttcgctattgctaggtgggactttggtgcagatgctattatcgtaggtgtcggttttagaaagtaatagtggtagctttaactgaagctcgatctattcgtctcgatagaacaccaacaagcacgtccgattgactcaagacaggcgatcagagatgggctggctgtggtcccgactgcccatcaaggctgagaactacgagattgaagtggagttcaacgtcagtccaccacatcaggttatttattgaacaaggcgctgatactattcgtatattcgcaggtgaacggaaaggggcacagcttgttcggagatgggttcgcgatgtggttgacgacggatcgagccaagcccggtccagtgtttggcagcatcggtgagtagcggatctagtgcaggccaagttttcgtcggactgacgatatctgtctacttgtatgcagacaactttaccggtctgggtctgttcttcgacacttaccccaactcgcggcatacgtattcgttcccccgggctacggccatgttgggtgacggcaagactccttatgatcacgaccatgacaaccaagccaacgagctggccgcttgttccgtaagtcttgtgcccagagtctatggtccgcaatctgtccgcctgacacgcctgccctgcgaacggtagatggatttccgtcgacgagacacccggaccatgctcaagcttaggtacatcaagggcaagtcgctgagcttgcaactccaggtcgacaaggagggacgatgggaccactgctttgaagcgttgaacgtgcagatgcccgctggagacatctacctcggtttctcggctctgacaggtgatgtcagcgatgcccacgagtgagagcctgatctaaagtctcgtgccgacgacccgagtttgatgagatatactgggttcatcttgatagcatcatctccgtctcgaccaattcgattgtcttcaacagtactctcccgggggacgcatcgagccagctttatcactcgaaaaagggcaaaaagagctctagcaccggtctgagtatgttcctattcctgctcaaggcgatcggggtgctagcgttttgcgctttcgctttctctgcatacgtgagtcgtcgtgacgtgacgtggttgtgaaagagctttcgtgctgatggacgacatctggatgtcattcgcagcggacttataacgctcagaagaggggcaagaggttctagatgggatgttttgtagtacctttgcatgacgtctgcatcaggacatgacccagatcatcaatggaccagtctgcgagatcggatggctgctcggcgaggcctgggaggtttgacagggatcggcgagcgacgaagcaacaagcaagtgatcgcgtgcgcaagtattcgaggataaaccgtccatgactgctcgacccgttgatagaagttttcgactctccttggacgatcaatcgcattcaaacatgctcacccacctagcacttgttaagtcaccatctacttcccggcttgcgcatgcaaacctcttgatctttcatgtctcctggtaatccagcagcgtgtccctccccttttcggatgcaaaccgggtgtggtgtggtggtatggttgatccatcttctctctccatttcactttgtaaacaaaagagacgagtacactgacttctactagctactaaagagggcacacacacgcgcaaagagttagcttaccccagcttgattgctcgtcaatccagctctatactttgatatacatcctgaatcgggtctattcattcacacggtttgatctaccacttcattcgagctccgagctaacccgtagcaacctcccggacctggacagacatggcaagtctagccatcccttcgccgcgagctcaagtcatcaaacgctgatcaggccggatcgatcggcctcgacggtgacacacagtctctcactcatcaggctctccgtgtaatctccaaggatgtagtcaagatcactcgatctccacctgaggatgtcagggttagggtccaggagggcgatatcggagctgaaggaggggtcgtcgggatcgtcagaggtccaggtgcgtctggtcctcaagctggttcggatctacgattcactgatcgacattgataccccatcgatagagggaacaccttatgccaacggctatttcaacgtatctttctcgttcgccggaatcgactaccctaaccatcctcccaagtgtaagctcggtcccgctccatcagtccccgcccccccactttggctgatttcagcttgttcgcccgcttctcccgatcggtgatcgatgcaggtacgatggtcaccaagatattccacccgaacatctcgaaagctggcgagatctgcgtggacacgttgaaaaaggcctggacgaggaatctaggtatcgccgacgtcctcgtcgtcagtctccccgatctcgagatccgtacccgttggcttcgtcagctgattacctattccgttgtccccccgtgctggctgtgaaaagacgatcaaatgcctcttgatccacccgaaccccgaatctgccttggacgaagaagcagggaaacagcttttggaggattacgaagggtatgccaaagtgagtctacgggtttcgattaccacaatagctacggattgggtattggggctgacagaatgtctggatctggggttccgtagatggcgaggatgatgaccaagattcacgccgtaccgagagtgagcaagagattgcgagcggtattcttcgtttggacatgtacttatacgatttcgttgcttctctaggtacctcctgtggaattcggtgaaaccgctccggctcaagaagagcataatccagctgcatccgtagctcccttgaaggaaacgcaggctgctgcccagatggcgaacatgccgcaagtaccgactctcggcaagcctaatgtggagaacgccgtccaagcaacagcgaccacgcaggaccccgcacccaaagccaaagtccctacaagagccccgcctaggagaggtctcaagaggctttaaacccctactatgcttctccggcgcaccatctgccggattccagacaacgcgacttctgctttcacaaccaggagcgatagtccgggcgtccttttatcggacaagacgctccccatttaacgatcttgtatccatacttaattcacgagcttggcgtcacaggcacgccggctctctctttctctcttgatgtgtcttgatgagattgctatccgcatcagtcgatgtgcaattacccctccgggatgaagttgtaccggatccggctgatcgcctcgaaaacgcatatcactcaccgaattcgcttcctttcggacttggccttcatcacttgttcctcgacatgatcagggtagaagctaagcattcatgcttgatgactggtctacaagggagatgagcacgtatattacacacattgatcgccagtagtgacaaagatgccaatcaatctgcaactcggtatcggcaaccgctggatcccaattcgatcgtcacctgccagcgtattcgagacagtcaagcgggtgttcaccgagtacatttgagcaaggtcggtcgaaccttccggacatatcacataaagggtacacgtacggtccgataccgcctcccaaaagaagaccagaaagcgggaaaagaaacccgggtagcgtagaggtctggcgaaatggagggcgtcatacccagcaattgggcaggtgatggagatcatggaattaccgccggaggacccaacgagcagatcttgaacgctgctacgcatgggcaaaccgtggattcaggtaagaatgacgatgcttctcctccggttgaccttctaatatccaatgttctgtgatatcgaacaggtaacaacccgtctctcaaccaattctacgccgagatcgaagctcgtgcttctagagaagctacgcccgagattccggcggaggggaacacctcacagcaggagaccattcatgaagaactcgctcggactgagaacggatataccgcaggtgctggcccggggcagattcagactgcatcgatggatatcgttcaggtaggtctgcgctttgacaacagaaatctagccctttaacatgttgctgattgatgattgcgttacgtcgacttagtagaatgtcgttgagattgagcaacagggtcaggggagcggatccgaagctaggattgccctagacgagttgtctccagccgaagcggcggctgaaaacgagatggaggtcgacgtcacgaccgcagcgggtcactcaggtcgagcgttccccgcgaaatccgtcttggcgaatttggccatgtacaacgattcacaagctgcacgggctacttcatccccactatccgaggcgcccgaggcgatcgattatcctgccgggtcaagaggaaaggcttccgtccgatctaccgaggtcgccaatgcataggtgcagaggattgaggaggaatacgaagagggcggagtggcgcagcaagagatgattgatgcgttgagagctgcggcgcaggggcgtctgccgttggggggcgtaaccctacaagaagaaaacaggccggcggacgttccaaggggattgagatactccgaggaagaagttcgacgaggggtaggtcaggttcgttgaactttcgacagagacttcacgctgactcgaccaccgatatcccatagattcacattcaaccgatcgtagagctactaagcaacctgacggacccgtccctgatcaaggaagcccatctcatgctggaacgcgggaagaccccgagcacgttcttccgtgtagatactcggatcaacgagcattacgagcgggacctgacagagtttaaaaaggaatccgaactgaaagcggcccagatcagaaaagatcgggatctcgcagcccaaatgggaggtacagctgtcgacgagacgatccagaccatggcttcgtcggtcaacgccgagagcgggccttcctcagtcccgagtgggactctgaatccgtctgttctgtcaacctttgtcgatggctcgagcgatgacaggattcctggagtgccacaaaagaaacctcagccgtcacccgtcaaccgggagctccgcgtcgacatgtacacactgcatcctgcgcaattgtacaacctcgagatgttccgccgcaagacgctgaaagagccgccccttgaggtcactctgctgaagtttatatctaccaagagtcttcgcaagaggacaccagagccagagccagagccagctcccatcgtccctccagcacccaggaaaaccaaggcagaacgggatgcggaaaaggctgaagaacagctcgaaagggagcgattagccgctgagatcgtcaaagccatggcagaggaggagaggaccgagcctttacccgacaactctgacgatgacgcctatgacccggtggatgggaggagaagcaggcggatgctcgctcggggaaaacctggtagcgaggaagaagacgctgaatatgagcggttaccgtcgcagagcggacgacggcgcgggcctcgaagcggtcgagtatcgagaaggcaaaccggagtcatcgttttggacgcggacgaagcgagttcggctcagggccaggcggtagtcacgcccaagagaggacgaggtcgtccacgcatacacccacttgtcgcagtcccaacggcgcccttacccttacctactgctacacctggatcatcgggtgcagccgttccagcctcagccgttcggccaacaccgaagagacgaggaaggcctcctttggaacgacctacaccggatgccattgaatcgttcaccgctcggcgaaccatcagttcccgttctgggcgtgccgtctcagaggatcctagccaaggcacctctgcttacgtcctcgaggatgacatgatgaacgatgtgggcggtttcgaagacaattacgagtctagttcaccacctgcgcaacgacccgcacgctcgagcagacgaggtccggcctctccttcagtagagcctcttcggccgtctaccagaaagcgccgtcagtcgagcgacgcgatatcggacgtcaatgagcgtgccaacaagagaggccgcaagggtagagcggatgacgagggaatcgagtccgcatcgaacgcagaccagcgacgtgtgacgcggagtcgtcgagaggaatctcctccctcaaaggtggcaactcgtcggaccgccactcatacaggagcaatctcgaatcgagggagaggtcgtggtaggccgcctgggtggagtaacggtcggtccgcccgaggacgaggtcttgcacgaaccgtcacccgtggtcatagcaatcgaaaagtcacagagtcgcctgaagttgaagcaacaccaggcagatcaactcgtagcggtatcaaaatcatggacagcaatgttggcaatgcgaccccgacgagatcgaccagagccaacccagcccttgccagcagctcgcgacgcggacgtcccgagcgggaaagcgtcgctacaacgagcctcttggccagctcgcccccacgtacaacaaggagcagtggacgtccaaaatatgatctagacgatcaggctcccaaaagaacccgcgaggctgtacgtcctggccctcgtcggatcgtctctcaaacgccgctcgcccgtagaactactcgaggttctggcccaaagttgcctagtcctgctccgcgcacaccccgtgagcgaaacccgatgaagtccacagcagcctctcgatcggagccatcttccagagcgacgcgtgctcgagggtcgcctgtctccacaaatcgatcattgcgtgctcgagaagcctctggccctgaatcaccgcctggccgatccagtgccagggtcaaagtgccgccgaagaaccctaaagcgtcccctgttcagtccaaacgagctgctacaaagtcaatccctgctaaaccgacgccttcaaggccgatgcctgccaaatcaaaggcaatcgaacgcaaaacgagcgccgctatcgccagatcgagccggatggaaaagcatttcccccgtcctgtcaaagggcctaccgaatcgactttacaatactttgacggccgaaacctggtcaaagggcgattcgctctcgaggttgtgatcgagtcactacccaagtccacgaagaggcttttcaagcggcaacttttgccacctatcccggatggcgcgatgcccaggagaccgtacgacggtctacaagaaggaggatcagcacgacgtcagatggctgcctcgagcgaagtcgacccgatggaggatgtcgacgctgcgcttcttaatgcagctagtcaacaggtcatcgaatcagatgacaatgcaccgttgcttaggaggaaagggaaagaaagagcgacttcgccgcgtaacgaggatgacgaaatcacggttgatttcgaaagtgaagatggctatgaagtcaggaatattgccgcagaagaatcgagcgacgacgatgacgaggctgagatcgaggacgatccagactttgctcagcgcttcgcttttttgaagtgatgtgttgctgctacgccagcccgaattgtatgcatgtctcgagcgattcgtgattcgtgatttcgttacaacttgtatgtcaaatttaggaaaatgtccgcggatgtcgttgcgcctatgatactttgatgaatgcgaatgccatgtagattgctaggtccgggaagcaatgacgacttattgtcagcacttccttctttccgtatgagactgttcagtctgactcacagcatgcagaccactgttcggggtccatgttgagcgctccgtttcttgtgacttccatgcgctctgcgagctgtgcagactcggggttgagcgactcttccgcgtagacttggtcaaaatctttggaataaatctctttcaagccatacgagagggccaacctgttcgggcagagtctcatgttagtgctcgtggaaaaatgcaacggggtggtgattgactcactctcggaatgcgtcccaatgtacgatatactccgagcaatcctctacagcctcagccagggtgaaacgataggaatgtccgtacacgccctcgtagtcacgcttctcaaagacgatgttataataagggttgccaattttgagctcctcgctctcttcaggaatgtgtgccaagagccctctaggacaagtgagcctgcatcaataggctgttcggctttgcgagtgataacatccgacacttacaagacttttgacgcagacaatgtggtaccgaggaatgtaccgcccgtcctgagcgagtctgagatgtttgaaagcatttgccggaccttggtctccgattcgaaagcatagtgcatgcagaattgcatgctgatcgtatcaaactttggttcaagcaacttgcggggcacagcgacagtgatggggaactatgatgaaaccagatgccagtaagcggtagctcccgctgaggggcaaagggaaaaagaccacctacagagaagcagtctaggacgaagaggtgcggccgaaaccacaatcgcttcttgtaggtccggatgcgctcatcaaagtcctggatcgaccccgatgcgacatctattacgtgttacgggatattcaggtgtcttttcgatgacgacggactccagtgaccggtcggcttaccgattccgacatactcgtcgattttcagcctattccacttctcaatgtcccctcccttgccacaacccatatcgagcactcgtccgttgggcctagcgtcacggtccctggtgtcgaaattggtgacgcccggcctcctccgcgtgaatcggttgatcaggatagatttgatccagttgttgcactttttcagaccatacgttacggattgtgtccgttcggtccttcccgtgttacccctagcattgtctaccgatcggaatgacgacgtttcagcggggttcttatgtgtgatcgatactcgcttgacttacaatgcgctgcgacctcgctctgttcgttcagagcctcggctggacctcgtcgcgcccgcttgagtgcccagccgttgtcttcttcctggtagccatctccgttcgtgtaaggcgaatccctcgctcgctttcgtccgcttagcgacgagctggctccctcgccacctggtggcccagacggccggtctttaccctctgccatggttcggaagggacatcccttacgaaggggattcaagcaatttcgggcgtcgaggtaccaggccttgtcctctgcgctcagtggttttagtaccgagagtggggccgtcagtcggcggtgaggcttgtattccgtcttgccactgtgtgcgggctccacggcgggctctggaagcggctcgggcttctcatcagcagggaagatctgcgcagccaagtcgaccggggttttctgccttgaaatctgcgggccagcgtcctctttctcgagtcgaggtgcaactcgagctgatggcgacaggactgaaagttctgcagtcgcaggcggagtatctgttcgttccattttgatgggggactccgacgagttgcgccgagagacggtctcggcccttactgtctccggaacgacaggcttttcctcctccttcgcctggagctcatcattccgctcattatcaacggtctctgtggtgacctcgtcgtacgagtcgtcactgtcgtccatcgtctcttccttcttgaaatcggctgctggctttgactgagccaattgaacgtcctcgatatcgcttgccgattcctcgtgctgttcactgtgcctcgctcgacccgaccccgctcgttcgctcagactggccaggacgtccagagcgctcgccccgtccgggatctcgacgtccatcatctcgttatctcccgcaacggaatgaccattcgtctccgtcttgaccggggagacttctagagaggtatgggtcggtgaagcgagttcgatcacgctaagccgtcttgagcgcgggatgacatggtgaagctccggctcgttggatggggagatgagaccgttcaggttggatgacctgctcggcgtggacgccggttcacccgtccagcccaggatcgaagatcgacgctctgatccgtctggagagacggtgccttcgaaacgtccagatgaccggcggacggagtcccgcgattctgcctgaccttctaggagcaaacctccgctcgtgcttctgctgatgggcatcgaatgtgtatcactcggtgtcgccgtacgggtctgtccgaccgccccatacagcgatcggggttccgtactgggtgagcggtagggtttggcgtccgaggaagagattaggttgtggatagacgtcactgaaggggaaggtgacggggccttgccagcgggaccgcgcgaaggggggcgatacccggaaagcggaaaccctgtttgcgcattggtggccgggggaagaggtcgtgactgatatgtgggtgacttttgagggttatacagaccgtagagtgcgggagaacgttgagatgtatgctgggacgacccggtcggcgtaggtggaaaagggtattcccgggggtgacctccgctcgatgtgggaacggcgaaccgtggggacttggcgttcgagccgagtggtgaaggtgatggataatggctcggcgtcatcccaggtgtcatggctgttgtcgatgagggggtcgccatcggagccggtccgttgagcagcatgctcaaactcctcccttcacccatcgatcctggcgaccctgcacctccaagcacgcttccgatcgacgggtgtcggtattctctcctatgagagggtacttgtccctgtgtactcccacttgaccgtcgctccgggaaggcacctggctcctcgtcgtcattcagcaagcccctcaatcctcctgatgagccgggtctcgacgacgcctgacgctcgtgctgtcccggatatggctgtctttcgtgaggggagggcacttcctggtattgaggactgagcccagtacggccgtgtccgttgttcgcagggttcgagtggaaaggatagtgggtatcgagcatgggtgttgctgaggatgaacggctggagagagtgtccctgatagcgtcgtaggccatgatgtttgcggtcgctgctgccaaatgacttggtctgcgagttgtgaattttctcctcgtccgtatcacagtgaactacttgctaaaaggtctcttgttggtgcttgtgtgtaatatctatagtcgaggcgatatgatgaacctgtggtgaaaagagcagggcgatttgatgtagctcgtcaatcgaaaaaggaaagagcgcgaaactgagcaaagtgcagtccaagagtatgtcaagtccaacctagtaagatatcatcatataagtggctgctggtagtcgtagaggatgatcgttcaacgtattcgagatgtgatcgccatgttatatcgagacgacctcttgaacgtttcacctgcttgctaagctccaactcgactgtgaaaatcgcgcaaaacgcgcgaaaagtgcaaatctctcaggttcgtacagtagatatcctcttatcccttcgagctcaaccgtgccatgcatagtaaacgcatctatatctgttctcattgttctgagacaaatgttcacttggtcgttgttgacgcatcacctcgtgccactttcctgctcaagatcctataatccgcgtcttccctcctctcgacgtctccctcggcccagtccttgtcgaccgccttcaacagggctgatttgtctttggcaccgcctcctttcgtatgacgttgtctctgcaatagccgggtaaagagcgaaagacgatacgaataggtgggatcgatctcgtctggcttgaatctgcaggtgaaaggaagagtttagctcgatgccaatgagtcgatcttccaacatcgacatacccgtgcttcttgtagaatctcagggcaggaacattgtctatcggtatagaagaatgagcatttcctgtgcgatcttaagtttggctcaggactaacgtttcaggcaagtcaacatgaccttgctcaaatgcaacctttccgccatcttcatcgtgtcgtctaccaatgccgctcctaagccttttccttgatgtcctttcacagtctgcagctcgtatcttcccgcagaatgcgtcagcttagcttgttatcaactcggaatcacaagctcagtataggctcacatgtacagcacgtccacctgtttgctctcatcccccgtgtccagcgattgctgcgtgtcctccttacacaccctcagagcgacgtaagccaacaactccgagggctgagacgatgagtgaagggacaagtaatattgttccgggtcaaagagctcgaggtgtttttccttcgactccgagtatagagaggtcggcttgacgctgatgaggcaggaatgatcgtgttcataacgaagattagtcgtcggctctatagtatcgaatcttcgataaacctggactcacacgtctcccatattctcccaatagacactttcgatcctctccctcgcggtcaattccatgtccaagcctcgtcctaaccgaacatcgagcctgatcttcgacgattgttgctgctgagcctggatagtcccaaatgatttaccagctgccagaaggtgctcacgatgtatcatcaccctgtattcggacggccggctggtaattctgcaggctctgtgcggtgcggtcgttcaggagcatgcgacgaggattcacagacgagtcgactgacgaggtaccatgaggcgtgctctggtgcttgttgacgatccatcgtttagagatacggataaagttcagtcttgagagaaccctcgcctcgatctgacacctcttatggtctcatcgttgtctactcctggcaggaagatcatgttcagacagagtaaaccatcgcaagtactatagtcatcacatgcagctaagctggaggtttcgtcgaggtctgctcccggatcgcggaagcaaatggattcgaatcagacggtctcgtcaagaagcttgggctcatcatcatcattcatacatttaggtattttagttgcgcatgttagctttatgatcgatgatggactggttttctatgccacgggtcggcatctgacagaaatctcaaggccaactcagtctaagctcggtatggacgccaaacctgccatgacgcacccccgccccatagatcaagaagccggccatgcggacgaagtctttgagaatccttcgttcgcgaccaagaagatgctgcacgaacactggtcgcggcagagtatcgatgatcctgttgcatccattggagagatccggcgatacgtcaaaggtcaacgccatggcctcccgctatcctgggacgccgatcatggtcattctctgccaggcatacctctttgctggccgcgatgaaccggccatggccgccgcccgacgagctgaacgactgggcaattcgatcgaaatctcgcccggtaactcccacagctactctgcgtcgcaacctcaggctgcagaggccttgaagaacaggtgttcgaccctgatggcgcaaattcaggccgagctgctgcaacctatctcatcgacatcggggcgggaaacacccaccagagagacgtcggcccagcaaaaaatcactactgccgacgatttcactcatggttcaacgatcgcaaaagaggttaagcattctttcgttgccccaccccatacaaatgcaccaccgtcgcggtcatctagttcaaaggaccactggcagccggatcaccaggtggcgacgcctgtgactgccgtctctgatgcttcgcaaagccctcaaccacgccgtacagcctacccgccttcagcatcgccatccaaatctactttacccgatatcccaaccctctcggaggaagaagcggatacgcaggtctggggtatattgaggacgctggatcatcacgccgcctctgactttcccccctcgtcttatgctgaattatggagactggtcatgtttgtcctccggaggtctggggacctgcaactggttccaatcaccattccagaggtcacgcagagtatccttcgtctggcggaggtgagccctatcagggcattccttacgagaaggccactagctcaatctatgcctgattccgtccttcgcagaaccaacctcaacctgtccatgactttggcggggcccagtataacgatactcagggggatcttaccggggcggaagacagagttagtggaagcgacctcatcacgcactgcctcagtcgaactggctccctgatgatatcgtgcccttcatgtagccaaagcggaccggaccgggtagcgccaccagaactattcccagggtgtagccactcgatcttcttttgcccgaatggtgggtttatctcagacgaagacggaatatggagaggcctgcgtgagaggaatcggccaggtggacgaccagatcaagccgacttggagcgtggtccgagccggcactgtacacagaccgaaggcagagtatcacgtgtggcctactgtacagtacggcggaggggataagaccaagtagaggacgggcagggcgtatcaccgtgaagcgttagcgggacaaggcgtcagcttgatcgccatgatatgactgtaaaccaagcggcatgctctatggactggtgatggatgtcgttataatccaagcggaacgccggcgcaaagtcttcaggcttgaccttttcggcgtagagctccagatacttctcgggaggacttgaacctcttgatgaccaaggcggtcagagttccgactctccgtcttcttcaggcatcttcttgtggatagctgcagccaaagatcccccggccattgtgcgaggcaagaatccgaaaccgctccctgtcacctcgtgccgattacgtcatctcatccaaaacctgccgaagataacctccgaccggcatcttgtctcggcccggtcgagtggcttggcatgatgatcaccgaacgttcacacaggtcacacagagtagtacgagcatataggaccgcatgaggtgtgatccgtgggattcaatcggactcttgaccaagatcacagatcacatactccgacacacatcacaacaaagatatggtgctcaacttgcacggaataacagctagcttgatcggaggatctaaggatggcagggtcgtggtcacgcccggtgagacgatccgggggacttactcgctagacaagacgagcggggtggaacgggtctggatcgatatcgtcggaattcaggtcagtcttctaggcaggtgactccagtctggaagtcgagactcatcctggtttcttgtagtacgcttcggtcatgaaagggaaggccgaagctcttcaaggtagaccgggattcacatcggccaccctcgctctgaacgaatccgggcatccccagcttatgaataccgacaagacattcttccggaaatccaccgacttgaccttgccgggagatgatggacagggagagttcgaggtggtcgtaccagaggaagaagacgagtttatcgatgtcctcggtaaagggtggggcaagggggagttgcccccttctctataccttgggaggaggaatttcgaggctggtgttatcggattcagtacgtgtcccttcgggcgattttatctgattcgccggaagaatcctcgttgatccatgatggtacggctcggtagaccggtatcacgtcactttgaacgtgacgaaaaagagcttcctcaaacgttcaaccaagcgagtcaaatcgatcatgttcgatcgtccgctatacagctgacacctgtttgacatctctagatccatctctttaccttttttcctcatgccactcgatcccaaccctcagcccaatctggacccgatcggctcattcttgaccccgccggaccagatcccgggggtacctaaggggtggacgggaagaggagcggtggcatgggacgttcaaaagaagtcttggataaaaggtttccaagtgcaggataaaggagaggcgggaaaaggggttatcgctcaggtaagtaggagtatattaagactgctttccagggaaagatcacttacttgatgagcagatctcgactccggatatcccctcgtgggcagccggtataccgataccttatcacctctctatctcgtactccccctccgacccacaagatcagggacaggtagatgtcactcgactagacccccagttcaggctggagagagcgtgtaaagtcgccgtcggcaaagacagccggttcgtgctcgactcgatcaagggggacagctttgtcatcaagaaaggcggggtctgggtaggggatggtcaggtggtagagatgggcgagatggtgtgcaaggctttacccaacgtttccaacgctgggatcaggatgcaggtgagctatcagcgcaaagttccttcctctggcgcgacctggatgctgaccgagcggctcggccgcttcagtatgacctcgagctagacgtttccctcggatccgaatccgctttcggcgcgcaaacacacacgttcaagttgtttcatccgaagatcacttccaatatccgccgggcgggagaatcggaacagttgccagcctataccgaggtcgatagtttggttgacgacgagtattggaaaggagtagaggatgtttccaaattgaaggagaaataagtggttcgaagactacgaggattagttcattatatatacctttcgttccagaaccgaaacgataccccgtatatcgagccatgtcaaatggagatgtcataatagcgcatgaagctgaacatgaattgaacgcaatgtgtgatctctaagccctcgagacttcttgaaagtggacccaacctgaagaggggcctcttcatgccgaggcagcctggtaacaagcggtttgctgctaaataagacaggttcagcttcatgccagggctagcgcgatcgaaccattgactcgcctgagtttggcactggttgacagatcctcccgcagctcgaccggccggcgagttagcccaggctccacagaggttcatctggtcatcacagctcctcctgagagcgtcagggagaaagttgaaggtgttggttccctccttgaactggttgctcgaggctatgtagtggacaacaggctcaaggtcagatcgaggaggcactgggatacgagggaggagaagacgtaccggtgacaggaggagcagcgataccgccgagagctcctttgaacttttggaggttgccggcggtaccagcggcggtcgtagtagcgggcttcgcggaggtacgaacagtagtggtagggctagcagcagcggtagtggtgacgggctttgccgaagacactggcttggtgggagtgaccgctgaaaagagccacgtcaggcgttcgtctcaacctgttatggttcctcgcctgagacttaccggcagaagttgccttgctgggagcggcctggatggacgaagtcttgggcagagtcgacgaggttctcgtgcgaatagcagccggggtcgacgacgacgaggccttggaagcgctaggggcaggagcaggtgcaggtgcagcgacggatccggcgccaggcaagtaagggttgacggcagcggcgacgagagcattgtcggtacctccgttagggatggcggacaagacgtagctcgagtcgaaagctccaccctgtaaaacccaaagcgtcaacagcatatcggcgggaagacagctttggttcgactcacgctccaaatgacaaagccgatgatactggacgactgctccacgacagtcttgagctgagcagagagtctaatcagggaagcattgtgtcagtcggagcatcatgatgagcagtttgaggacgactcacgcggtcttgcagctagcatcaggaccagctccggtctcgctcaagatggcctgtcgacccttgcccttgaggtaactggcgaggctgttcatcatggcgacattgctatcgagggcaaagtcggaaaaaaagtcagcgatcaggcaggatagtcatcattttgaactaaggtagatgacatactcggtagtgcaatcggcatgggtacccgagccgtccgagtccaagtacctatgaatcatgcctcaatggttaatcgtccgcatatctgcttttcgggaccaggggtatcgactcactgatgaacatcgagcaacaacttttccttgccacccgcggggtcagtgatctgaacgatagggtcgttggtcccatcgatccatcgaggagcgtgagtccattcttggctagagaagcgagctcgtgtcagcgtccactttgttatattacgacatgctggggaatgacccccgtaagaatactgaccctggaagcaggatgtactgggaggtcgctcccgcagctcgaatagcattgaccgaggcctgaagggtcttggcaaacgtcccgatgttggggatatcatgaggctcgttcatcagcccgaagacaacctttggctgcgcgctgtactttttcgccaattgttcccaaacgttggcgagctgagcgtcggtgggtccgccttgaccgacgatccctccgttccaacgagcatagttgtgaaggtctaggatggcgtaggcgcccttactcaaggtgtactggactagcttgtcataggcagtgaaccaggaagcgctcagggttccaccgagtgatccaccgacggcggggttccagccaaaggggagtcggaagacgttggcgccgctcttgacaaagtggtcgatctgcgaggcagccgggttggaggtggacatcgggtcgacatagttgcctgcgagaggggagtcgggcgtcagtctccgacaagtagcggagtcgtgatacagacctggttcttacccgagtatcctccgttggtatcggtgccgaaatcgaatccgctgcatcaatgttagagccaggtcagtcgatttgatcagcatgaagtgaaaccgtgccactcacgcaatgttgaaacctcccaacctgggaagagcccgcttctcgatttgggcggtaggcgcagcctggaccagcgcggcgagggcggtactaatgatggcgaggcttgagaatcgcatcgtcaagatgtcgatcgtttgttatttggtgtagtgagggaagggtaaagacggtagattttgggtagaagaaggcagagaagaggaaagtgtttaaatgggtaaaagtatactgtgaagaaaggagaaaagggaatttgatctgaggaaatggcgaccccatatatatacgtcccttgaccccttgttgtcatgacgaccctttggagggactcgacgcgaacatgatctcgatcaagggggcatgtggcctgtggaggtgtttctggagagatcgagcaggaacgcggcggccaatgtggcgaaagaccaggggcgcacggtcgccggcgcagtcaacaagccagaaataggtcccgcgagctagccgggagagatcgggcaaaaagcaagcacgacgaccagggggaaaggtgaaacgcacaacacgcgtggagcagggcaaggcgcagggcggcggtagactgacccttaccttgagcttaggtggataccgcgcgacagggcaaggaaggggagatcaccctgtttttaggtttggaatgttccgttcggtgttgactgtcgtcatgaaaggagggttcagcgtgtggatcttcgagtcggagagtgaaacgtttcgatcgaccttagtatcgccgagacacggcacacagcaagcaatcgatggctttccttcctgcagactgctgtatctaatccgaacatgcgtttcggtgacgaatttagccatgagtcgtgatgacagcgactgggaatactgtttgtagaggccttgaccccttgctctcgccgccatgccaacaccactgctgattgaattatccgcgcgtcatcatctggatgccccttagcacctcctgccgatacatgcgactcattccggaggaactgcctggcctcgatgtgacctgtcaacatggccagggcctatcgtgctctcgattgagccctggtcgaccgaaccgttcatcgagcgtcattggttcgacctcggcagacgttccgtaccaccggtggcgaacgatacataaccatcgccaacagtcctcataatccgtcagcgtatgccacgactcctgccgcttgatttgagcttgagccaagccgacccaagtttccaagtgtgatgaactccgcttcgagatggtcgccatgtcttgcacaccgtgattcattcgagccttccagtttcctcctttgctgctataccaatacatcctttttccgaggggccccttttacaccctatctacagtctcctttctacgagcggctcttccattcggtcgacatttcatacatgatgtcaagtccgtctctagtcttttctcctaccaaccgtctagatctcggctccgccctttctaccttcgataggctcttccatctcgtagctctaaagtaccgtaggtagcgatcagtaatacatacttgcagccacaatcttttgtgatatcgccactcacagtatctccggcgtacgacgtctccctctcgggtctctttcccccgacgtaaccggaccctcgtccctttttgttgccccacaatccgagcgcagcgaacaagatgcccgcgacgacgatcccgaccaaggcgccgatcacacctgcgacgacaggactgacgtgttgccttcccgaagtgctcgtgatgctcgcataatctgaagccgaggcggcacccgatgcaaggagctcacatcctcggctatcgtcgttcccacatcgttggcaccaggtcggcaagtcggagattccgtgaggctcgagagcgtcgataaaggtctggagtgggatctcggtctcggtgttgccaaacagggcgaccgggacgaaggggttatcggatccgataggctggtccgcaccgatgctctcatcggtcttggcacttccgttgcggctgtcaaggcgcgtcagtggtccgaatgtttatcgaacacagcacggcgacgctcacaagttcatggaaacggtcatcccgttcgtcccgttcctgacctcgagggcgagggcagaagcataactgacgaatccgtcgattccagcctgggtcatgttgaacagcgagaggaactgtgccggtcgcaaatcccaagtcagcacgatgcttagcgcagggtaggggttgggccagggaggaaacctcgccatcgccggcttcaaactcacaggcttgtacgaaatcccgatgtactgcaacttgagcggtttggtatcgctagcaatatcttgcaaggcgtcgatgatgggcgggatgatggtctgcgcagcgatgttaccgatcccgtccaagtccgggtcggtaaacaagacctgttcgtggtagttggccaagtaacggctcttttgctatagacgacattagggggatttgtcaatgtcggctcgatacccttagcagatgagggcccagacttgttctggactgaccatgatgtaatccgaagtcccgttctgagagacgatctccctgaatgtcgcattgtgaatgtactgtacgttcatgtaatcgaagacgttgtacatgttctgcatggtgaccgcccgtccatcgagcagcgggacgagggaatcgaggtactccttttcctgatcggcgatcgctcgaaagggggcagattggtagacctggttggtacgcgtgacaaaggccgggcaggacgtccatccctccagcaagatctcttcgtccgcttcgaccgtgctatcaggtccgagtcgagatgtgaagagacgtgaggtgagtgtacgaacggggaggttgtgtgtgagatgcccggatgcttacgtgacggggacgtagatgtacccacccagaggcgacgtgatgggggtcgagttggccaagatggcggttccagcagccgggtcggcggggaagaaaccctgagcgaaagaagaggccgagtcgacaatgacttgaccttccgatgcactgtgtatgcgagtgagaggagatcacgtcagcatgtgcggacgaccggcagggccttccgtatctccggggcgaggtcgaccttccgacccgagtcgaaggttacgagcggatctcgactcactctgccataaagttgacttcggacaagtcgatcaagggccaatccaccccggccactgcggtcgagctgtcattggtcaggtatttttcgcggaactggatgccagattgatacgtctgggcggatcccagcggggtgatcgacgtgtccgaggcggcatacgctgcggggtcgtagcggttcggtgaggaagcgttatgggttgttaggaggtagtagcttacatgtgggatctgaagagtatgcgatgaacgtcagcacaaggagacgacgtgaggtcaataggacgttccaaagtagagctcgtccttcgttcaaagctcaccctggtagtatccgctacgatctccatgtctgatgaatggcgagatggatatatcccgatcaggtcctgagcattcgaccgcgaccgacattcgacttgcctggttatgatgacagcaccaatcaccttggacccatttgtaggctggatatcgtaagacatgttgtgaggctggtctggtgaagctcttggacgatgttctggcgggcgggggagtcgttggattctattatatgatcaatgcaccgtgcgtattatgcgttgcgaggaccacctgaaggtttttgggattacgcagggacgatgcatatatgatggttatacttagcggatgtcaagaccttgggatggctcacgtacgcatcttatctcggccggaattccaaagatagcagggcgacgacgatttacgcggaggatcaggtcagatacccggggggtaagcagagcaaggtggaggcaaagtcaccgacccgagatcatcggggtcggtccgtatgcaaaacgttctaaccatgggcttaccaagttgcaacctagacgtcgaggatcgaatgaggtggaggacaaggtgcaaagcttaacacgggtcgaaacatgacatccctcggactgagatgtcgcttgccaacagaatcgtcgcccaagcaaacgcgacaagtcgccggttgatcgaccggagtccatcgaaacaagttcatatacattgccagctcccatttaccgaccgtggctcgagaccccgatgggacagtgcacgagacgagtagacccgcaagaacggcggaggaccttgtgcatcccggagtaggccccggccgcccataacatccatgccacgcgcaaaacagcaaaaagatttgtgacccctgcccggattgaacggacgaccgcacgatagcaagatcaaattgttggaatcgtatattctaccactgaactaaggggccggaacatgtcgtcagtcatttggctggtcttgtgttccgcgcgaacccagctgtagacaggcataacaagggcgttgaagagccctaccatcgtaggttctgatctggtagcaggacctcgaaccattcacacatgctaggcactactacggtcttgttgactcgagtgtccagcggaagtgcctcggaggtccagtcatctcgaattcaatcttgccggctataggacaagaaggcaagtcgtgtgtggtcaagtcgcgtttcgtccaagtgcaaacacaactgtgacatggacccactttacccgctctgcgtcatgctgtacggatgaccttcgataagggccgcggttggtcgacgagtcatagtcatgacttgtgagtacggtcgtaaactagacgtggcgagtgcgatggctacgagcttggatccgggaaagaaaagcaagagaaagatcagtagtaccggttggagggtccacaaccgtgaggaagctcgggaatacttcgcttgctgggttggtattcattgtgcgtggtcgttcaaggctaggacatggcggaggagaacgacacgtgcagagcgcgtgcttcgatatggtgagtgtgacagagtccacattgccggcgaggaggagggttcgagtataacaaagtgcatactaccggctacatatcgaagattacgatcgcaacgtttacaaggtacttgccgtcgcttgcggcgattgtcatatgactagccgctcgatatctcggacggtacttgctcccgaatcggaaacgtatgcatgtcgagtctggaccggtaaggaagcgcaaattgacgaggttcaatcggtgtccgatgtcaggtcgattacttccagcttctgcttctttgcttttgcttttgagacctcaaagaagcgggtgatgctgcgctctcgtcgcttcctggagctcgaaccgagagtcttcgacgagctcgaaccgggagtcttcgacgagctcgaacagggagcgttcgatgatgagctcgaatcgagagtctttgacgagctcgaaccgggagcgttcgatggcgagttcgaatcgagagtcttcgaggagctcgaaccgggagtctttgacgagctcgagccgggagcgtctaatgagctcgaaccgggagtctttgatccgcgagatcgcccatcgatgcgtggggcttgggcaggtacctcatcaaattgccagtattcgatgactccagacgttagagatcgaaaggtgtgatccccatggctgggtcgtttgtgtaaaggctggggggtcatgagaggtggcatgattgatgattgatgatcgtgttttcgtgagtacgtcgatcgatgaatgtgggagattcgtcagtttccttcagagcgaacttacaataatattgaatgataatgatactcgtactttcccaacctgcgagccatcgacttccatcaaaaccgagacgctcgagcgatcgagcgatttgatagccttgatgggagtgcttgtgagaaacctcggtttgagtgatttcatccgtcgcaccgtcgtcatcccatctttccatcgaactagccctcgtccaatgggttcagatcgactgggtataccgggaggattgctgtgcccgtgtgcgatccgagacattggcacagcccacacccttgttgatgggaaacacgtccgaaacacgctgtttgtgtgcggcctgtgcggtcccccgctacttgtggccggttcagctgatccactcgtttcgggagttcgggggatttctgttcgccggataagacgctgtccattcggggcgggggttgatcgcctatatttcaatgcagatcctttccatcgcctaaatctgatacgagatgaaacactcaacgattcgcgcgcgctaacaggtctttggttggcgggcccgaacgatctctggtcagagcttcccgtctgcgtttcgaccgtacgattcgaggctaacttgtcgaaatttcccaggccggaactaacccccccaagtcctctttcacagccgacgctggtgcaagaatgcaaatcggaggaatcgatgatgcctgtcaagagagagggaggggggcggaacgtctcgagcggtatcgggggaaccaaacggtccatcggagcacagtaatcgggatttcattgcttgatcgttgtgctggatttcgaggtcgtttcgtctccaagaagtatttgcacatataccgaaggtgttcgcgagtttcctcctcggggcgttgctccgcacaaggtcgcggctcatgactgaatctatcccggcgtcgagcgtgcagacgcgagagcgcgacgcgaaccctgtacccgccctttgcatccgccatatcgaccaaatcccgcggatgcaaagggcgggtacagggttcttggtgcgaacattaaatttccgaaagcagtctagctagtctagatgttgggtcctctcagagctagaaccggcatcgaactcaacctgggcctccttctaatcttcagtcccgggccaaagtctcgagaccctagcttgtccgattcgcattgatgcaagagcacagtttcagtcgtgactgtatcgaacatgctctgttgcaatcacgcattcatacagcccatcggccatcgatcaagctgcttcggaataacaataatatataatagaaagtggttctcgtcaagttcctgacggatgctgaaagtgaccgaaaatcagcatccggtacatatatgtggaacaacgcacaggatgtttggcgtctggatatctaggatgtaacgtcagaggaataggtcgaggccgagctcgtgcgcatgggtcagtgctcattcgacgtcgggctctccctatagccgagaaatatacgcccgaagtcggagaagccccaattgtacgacggctgtgcgacaggatgaatccactttgacccaccctcggttagatcggccccctcctttggataccaaaggcagatgatcgatgcgaacgacggtctctcacaatggactgtctgatcatcgaagggaggcgagagcgcgaaaggaggatcgacgctttcgccgccaaggctgagcgaccccgaagcgattcggcagcgagatctgtgaagtagggatcacagggacggttgaatcagccacggccgagcgcatgatcgagagactcgtgggtctatcgcgaaggttattgagattccgcgtttcaacccgttgttccctggcttgtttgccgttgttctgttgatgagaccctgtcggcgttgtcaaaggaagcgcccggtagatttatcgtatcactatgtggataccgaaactacccgatccaccgtcggcaggatcgtacagcgacaacaacgaatcacggcttgccattgtctgtgcatctggatcgggcccgagccaccaagtcacgaaaacatatagagtaggctacacgcaacacagtcactaccataacctagaggggcgtcgattagagccaacgagccaatgttcatcggccgggacttcctctaacatccgaacaacatagtaagctgaacgataccttcattccgctgtccgcgtgggtcttgccccgaagtatgactgaagaagccgaggttgttcgacagttgggagacgccatggaatcacccagtttcgtggaggagttggaatggcaaaaggattggcttcgccaaagggatcaaattatctctcggaacgtccctgaatggctacaggtcgagctatctcaaccgtacaaggagaacgtccacgccactacgaacatcgatgcagccactctcgataggactaccttgctcgaaactatctttacacaactttcccaggctgcgaaccttcggccccctgatgtctccccaactcttccttcaaggactatcgattacctgctgaggttactggtccatccttataccaccagtcctgatcacccagctcttcgaaaatgtgttgcaatggacaagacatcgtcatacttccaggtatacatgaggtctaggaaaagcactattggtgacgagttggcgaacttacgagtaggtctacgctctcaaacagaacgcaccaagacgcgccgaggcactaacaaagtaccgtcttcaatgtaaagcggttcgccggggtttaccagagctataagcctatcctccaaagcaaaatcgaccatctcgaggggttgggccaagcgggagctgttaccgtggagtctgattcaggagcagcaggcgtgagtcaagttcgtagcttttgtctcagatcggtcgtcgctgactcgttgttttctttgaagaccgtgtacactcggtactttggacagacgatcgcaaccgatcccctcgggcgtctacaacaggacaagaacgcactctcgcagtcaaccttgttcaagaattggtgccagagattttttaccggggattttgttgtgcacgaattcttggatttgcgggtggaactggatggctccactacatggttaaaacgcccagatctatggaaccgcgaatatctggtggcgtttgctggttgtcttggatcgatgaacagtgctcctggtggaatgccccaggtccaggtacgtctgggctcggacatactcgagtactgcaggcgcacccgctgacagacacgtttcatggcatcgctttatagcatgcaaccccaccagctctcgtcaatcgataccccctgaaggtcgttaaccccgtccagacaaacacagtcaatggcatagcaatcaaagaaagggtcgtacgacactaccttcgaatcctcgagttttacaaaaggctcgaactcccaaacctcgggctagtcagccgtacgatcgctttgacgcaagcgcgccaagcgttcactgggattcaagtagatgaacagtctcgagttctctctttgcttctcggaaaggaaataaccagtacgtttttgtgcttgtatagagggtacggtaagcgatgcctgaccgactgtgtcccgtctgcactcgcacctcaccatacagtacaggatgcgaagaccggaagcacattttactctgtcgactcaggaccaggacccaagctgttcgctaccgtcaagcaggttgttctcggttccaatgcagtcgatgagccatttgcggacctctggtccgtgaccacagcccaaacgcactacgacgtggcttgtgtcttcttggcccgcctcgtttacatcatgaatcctcgtctcattggggtcatgagcgatatcacaacgtatgtttttgacgcgcctggtctacatcatgcacttttgcctgattgcaatcataaatcacgtcaccagcacagctcttctatcggacgtcgcttacatcttgagcgaagcaacctcgaaatccatgtataggcaagtccacgctcggacggaatatatagcacgcaaattgacttataaagtcttccgtctatgcgcaaccctcacctgcagtttcctgaacatgtctttgacactcgaggaagaattcaaaaaggtctccgactttgctaagaagcttggagatcacagaagaacaaaagaggaagccgacgaagaaacctggcttttgcgatcgggagacttgattctcacaggtgatcacaccaaggtcgtcacgatggtggaccctggctactttgcctacctacctgccgctcagaggcacctctacccagtctacctgttgcaacaagagctctatcatcttgcaagaaccacaacggacgtcaacgccccttttcttcggcgaccgggactcgaacctttactacgagctgccaaagaaaaagcattcgcgttcatttcttcggtgacatcgctgcgcaaccggcgcgaagggtgggaccaagaggaacaagctgcaagggttgcggctagatctgccgtggcgcaaaaagggaggagcactgccatttccaggcagatcgcgttgataggttctccacacaggcaagtccgtccgtacaatcgccaaataacactgtggccaatctttattcgtaatcaacagcgctgaacgcagggaacaactggacactatcgccgcagacaagggcagtacaggtgcgtctacgcatactctggaagccaaagacgtcaaacaaggctcggctccttggttcgacatcctgctcaaagctcccaaaggtgcaggaatcggtctcagcgtcaatgccggtgttgctgccaccagccgagatactcagcgcatgcatgaacaactggctgcggcccggggggcaatcgatcgcaggataccagcctctaggttcagtgagaacagacagctcacactgcaagaggcactggattatacctcggattcctctcaggtattccaggtgaacaagtcccatccgaagtgcctgttccattgcacttgcacagtgtgcgaagccactgtgtacctctttggcctgagcaacatgcacttttgcctagaggaaaatactgccatcaaggatgccaacaccccagtcatatcagcaaagatcctctacccggttcacttgttcatgcgactggcgcccgaagagtctgaaaagtataccgtggtgaagagagatcaggtgaggtttttcgccaacgatctgaacgtatcaagtatggctgactctggctgtcaatcgacctcgtagaaagtcgtggcagtcgtgcgcaaggataccggcaccagagcccaacaggatagctacgtccagttgcagtgcaagatctacgagcgggtgcgtgaaatcgtcagccagcgacagatgatgggcgtcggtgcacgcatcgcctctgacgagatggacgctatcatcgacgaggaatatcgttcgagacagtagggccgctcatgtcagcttcgaagccccctagtagtcttctcgacaatattgacgatttgattgcgaacggaaacatgcacaaggaacatacgcgactgttggaaatacgcgcgagacatgtacgaatatcgaaaacgtacgagggcttggacgtcggtcggaaacgtgcgagcgagagcttgtactacatttgatccaagaccatatggaattacggccagtatctgtcctgcaccgggcagaagcaacgcgatgcggctgatgtgtgatagcctcggagactcgaaggggtgtagcgttgtttgttcttcaaaaggtgtcgatcgcgggccgatcgtttacgtccgagcatgccgcacatgcacgatcgcatgaagtccgggcgtcattttcagtcgaccgatcgcacgatctcctcggtcaataccttctcgatctgactagagaaagaccacaagataagcggactgaaatctgcaggcagtcagcgcccgaagctgaaggctgaccggacactgatcagaaacgtcaacggaagtctccgtggacgggcgttgagttatagcgggcaacaaatcagttgcggcgcgagacgtcgtcatcaacgacaaaggatgtgcttacccccgctacgagacaccaatcggactcctcgtatacccgaaagtctggcggtccggcccggatactgacttgatgttatcgctcgtgcgatagtaaggtccatgctgggcgccatccagtgcttctttgtctcttaccctcactccaatttctcggccgacgagccaaagtgccaaggacggatgaaggatcccctggccgaaaatttcctccccctctcgcatcgtctgtaccgtcgtccatcctactgaacaagagaaagtgaaaaaaatcatctcgtcatacccttttcgacccctgcaatccatcaacggcacatctccgtaggcttgaccatcgacatatttccattcaaaacccctcgaaatcgagagctccctgcacctttcgaccatggaggagtcggaacggcgaaacgaaaggtcgggacaagctgtcactgatcgcaaccaggaatttagggatgttatttgagaaacaagtttcctgtttcgagtcacagcgttgatattcgaccttgccttctcagcgtatacagaagcagcttacggcccgccaggcgatagtgagcagtgtgcctgcttctaaatacaggtggatgatcgtataatattcacctcaccatagatcttcacacagtcatatgaactttgtcttacatgtcccgagtgtctttgtcatggtaaaaacgatgatgaagcttcgtcgcgaactagccaaacgcgcgagagtgtgcgtgcaggggataacagtttcaagtccaaaaacacttggttcctccgccctgctgcggcctgtcgaggtgagatgtacacgggctcggtttgagaccatgagactcgcatggactgagtatatgatgagatgtttgtgattcgttgattcatattggacgaccagggtgggcggtcagttgcatttgaaacggctgggtgtaaccttccccccccccccaaacgaatgtaaatcccgaaaacgcataaacatgcaaccaaccgtgaaatcacccccagagccaagacccgatcgaccacccactcgatcacacacctatacatcccttctcacctctcgacccgctcgcacaccatacacatcccgtgtggtccgagtagtcaagaaccgaggcgatccgacactagtcatgtccttttttggctttgatgccaccttgcccgagaggcgagctgacgacgacgcagccgcctttggtgacaaggcgggtgctgaagatatcgccgtctacacctggggaactgaagcgtacgatggactgggggatcagttgcaagagcaaggagacgattcgaacgacctgacgttcggaggcggggatatcggtgagtttcgtcgtcgggtctgtcccgacctgatcgacaatgaactgatttgtcctgggctcgatcgggattcggcaggcaccgacttcaagtttgcccagcagaccgctcaatacaccggcaacgatagccgagggtatcagcagaatcaggtgcctacctcatacggatccaagtcgaggctcaaacctaccaagcccgcgtccgacctctttgccagtaccgaggccgactttttcggggctcccaaaaagtgtaagtcggagcggactcgagggccagggtctacatttctcacgtcgtctctatctttacagcctctcgccttcgtcaaaaggaaacttccagcaggaacgtacctacgacctcgtctttccactcgagtggacagtccaccccgacgcacaacactctcaatgccattgtccagcaagctgccaacccagctcccgcttacaagacgttggaggaaattgaagctgaagctcgggctaccgcctatgctcgcccgacctcggggatgatggcacctcctgccaatcaggcttcgtacggtgtccaaccgtctgccacctctggtcaacctggagaccgcccgatgacgctcgaagagatcgagagggagatgatgagcaacctcgccaagtcttcctcgccggcacctgcccagcaacctcaacacagtatgctctctggcttgccccaagcgttcgctcaacctgtttaccagggtcaacctcaagccccggccgtcgccggtgccattgtgcaacaggccccacccgcggcgtccgacttgaccgggatcgaactgctgcagaagcagctcggtaacctggccatgttcccgcccctcggatcggctgctcccggtaaaggacagcccaagagcgaggagcagatggacagggagctcgaagccaggatcagggagaccgaaatggccgagatgaagaggatgagaaaggccaacaagattgccagcatgtcgaggtacaacgacgtcatgaccggaggtacgttgtgccgtggctcaaactcgtgagaagcgtcatgtgctgatccgatttactatgcgcatccacaggtgacaaggagttcattacccgaattcagctctcccagctcgtcactcaagacccttacacgtccgacttttacgcccaggttcacagtgctatcactcgcgctcgtctcgctgctgtcggacaacccgtcggtcgaggacccgcggacggtcccaccgttctccaggtcggacccgacggccgaggtctgggcgtcggcgtcgtcaggagcactggcggacccaagaggctaaaggagactgcgatgcagaggatgaccgtacaggtaaagaggatcgtcgagaacgctcagaagcgtgctacggccgctccttccggttagtagcgagtcatcgtcccggaaccatgaccttcggctgaaacggcctcgtatttctgcgcgctctagccactttgcagggagctctcggcaagaacaagttcaggtcgtcggccacggcacctcgaccgacgctcgccgtgagcgcttcgtccaagaacttgcaaacgtcgaccgcgtccacgatcgccaacctgcttcagggaacgggcagctcggccccggctcacggcgaccgcaagcagcctctcaccgagaagcaagtcttgttcaggttggagcagctctacgagttgatcctcgatctcgagcagatgcgacgagatcagccccctcccgcgcctacggaagagcaaaaggtacactttggtatgagtgacgaagaggccgaggaaaagaggatccaggccgagcaatggtccaagcaatacgaaggagccgtcgaggccatgtggcaggctctgctcgtccaggagccccttgaagtcaggtaagcgacagcacatggcggcggatcagggagcctcgaaccgcattgacattgtctacttcgcagcgaccctcaccccttcatctcccttttgagcgtgcagaagggtcacaaactctttggtcgtctgattcgacacttgtcgcatcaacaatgcttgaccgttctcatcctcttgctcgcctgcttccctcaactcgatgtcgtgcgaaacgccccgacgccgacactcgctagctctagcatgctcggaccttatgagcgagcgactcacaagcgagccgaggcgagaaccgagacgttcctgtcttcggtcatccccgtggtggtccagcttgtcggacgactcgagctcaagatggtcgccgggatggtatctttgtgcagcgagaggtgggatgtcgccaaggtcttggctaccagggtgagttgtaccgcaagaattggtcgacgcgtgtgctgactcgaattgcgacgcgatagcccggtgtcgcgctcttcaccatcctgttctctcgagccgagatgctcaagcacatcgctgcggtacctgtacccgaaggacaccctgctcctatggtaccctcgcaagccgaactcgaccaatggtgggtagccgatgtcttcccacatggcgcacgtgtacaccacctaacgtaccatttttatccctataggaacctcgcctctgccaatctcctgcgcaacctcattcccaagctaccctcggtcttcccctcgactcaggctcaagccgccgcgtttggacccggtatctacctcctgggcggttctggtcaaaacgccgccagtgagatcggttccaaggacgaaaaggagggcatgcagatggatctgaaggacggagaagtctggggtctcattgcttcgttcggattgcaagctcctcctgatgagcagacgcagctcgtcagcagtcttagggacaaggtgggtcgctgggtcgtacggctcgcatgtcgactcgcaaagctaatcatattgggctgaccgactttgcagatcttgcacaccgtacactcggccaagaagggctgggtctctgcgccccgtggagagcttcgtctgaggaacgtcaacttgttcttgaacggattggtgagtgcaatcaggccttcgtcgacgtggaaaacatgagcgtcatactgaaccgcgtgatgtcaacgcagggcttgtccgccgacatgatcgactgagatccgatacgaggtgatgtaaaatgccattaaaaacaggtcaagcgagcttcaagcgggccattctgagagaaataacctttgtacaaacaagagcatgcatcggaacacatgacatgtcgtttcgaaacacggacattgacctgtttgttgttccagcagacgtcggtcaacggcgagtctcaccttccacgtcgacaaccccggtccctttatcgccaccacaagaaccattcacccatatacctcatcactcgtttccacatttccccttttcctctcaggtctctctcttagaaccccaaaccactctcaccatgacactcaaacgtaaatcaaatgctagcaccgcttccgatcctgattcggtcaagaaaccccgcctcgatgcggatggggaacgaccgatgaccgaaaaggaaaagcgcaaggcggctagaatgatcaggaatcgatcctcggctcaggcgtgagttgttgttgcccccaacgtggcttctcatcgtgtgtggctaatcggtatcatttgatgcgtttgcagatcaagagataaaaagcgcgaatacttggagggcttggaggcagccgtcgctaccttgaaagccgagaacaaggacttgaagaagaggatgatcgaccagaacacgcactcaatcatgaacggcggacaatacatcttgccgctctctcccgatcccagttcgatcgcgatcccggccaagcaggagcaagatcatactcctcgggaattttcgccaatgagcggggacgattccgcagacgaggacgaagaggatgatcaggactcgatgacgtttgaccgagaacgatccatgtcgaccgctcctgtccgtcgatcgagcgttcagacaaatcccgagcctgccgcccagacctcgtcggcgtcttcccaatacgctcaggcgctcgtagccctgaccaccgagaacgcgtcgctcaagacccggctcggcaagctcgaacaagtcatccaggtcttgctcggcatgaacggtggagtcgctccggtggccacgactaccaacccgggcttggatatactcaggttgctcggacccgatcaaccagaggctcctgttgccaacgacaactttggcacgctcgacccttcgacctacttgccaccccaagtgtcgcccagcgatatcagccctggtctaccctgctcacaaacctcatccgcttcccaaactctccccgccgacatcttgcctaccggacccgcccttacattccccgcgactccgacttccctcaccaccttccctactaccgagaacaaagatcacgctcgtcatccagcagcgatgacgacgaaccccgagctcactcacgtgtccgctcgaggttcggccctgcagcgggcgtgtttctcctcccctgcgccatcggccagggaggctcgggaacgggaatcaagcgagatgaagaacaaggtcgtccgtggtttgaagagggtgttggaatggcgtacgagatgcctatcggagcaaccgagcagagaggattttaccctggagagctcgatgcggaatgcgaccatgatttccagcgccgcctagaagaacatctcggctcggacatgaacctgaccgacaacactcattcgacctctttactcggtctcgagggcatgaacccgaggactttggaccttgacctgagcctctttgaactcggggtggacgagtatggtcttccgatgattcatgacccgttggggttgctatcgacctgaaatggacggtggatataacgaagcttgacgacattttacgatacttgtgagtagtggtcggcgcaagaatgcactttgccagcggctgacgctagtcctcgatagtcttatatataccctttacctggctggaacttgtctgctgttgacaaccaatatgacgatcagtcggatcgccttgacagcatggccgtctacaaaacgcaattggaacaaactttcgcaccgttcaatcttccgggcgtactattcgacgcctgctttcgcaccaaccttctctcaaacccggacttctcccctcctctcgtcttcttgctccctcttgttatgcatcttcgctggtccccgctctctcgaaagaggtcgagccggatcgcagagtgtttagctcactgggtgtttgaggcgttgggaagagggtggtttgggagagacagggggttgtcaagagggcagacgttcgtatagattcatctggtgggtgacgggcaaggggctgtgaagttgcgacatgtggaggttgtcctcaaagcggatcgatggatgatgcgtcgaacagctatttaatacttgtagcaatgaggaagtacctctagatagatcgctagttcaatgaatacgattataccgaatgctcctgtgctgcgctgctgctcgacatcacattgctctgggacgtcaaacgtcataccgccattcgagctgagactcctcgcgctcgtcggcggatcaacgagtaacgatcatgatcatcttcaactctcgagatgatgcacactagtagtaccgccttttgcgaggtgtcacgttggagtccatccaagcaccaaaacgatctaccatcaagatgtcctcgaggtatgccgaagaagaccgccggtacagagaccgcgagggagatcgagatcgcagtggacgggaccgagaccatgacaggcgaccaagtggagtagacaagagacgggacgacgataaatacttggaccgtcttgatgatcgggatcgtgatcgcagaggcgacagggacgagaggagagacagagagcatagatcccgtgatcggcaagtctttagccagtacccaggtcgcaacgttgttcgactaacgccgtttgacttttacagggatcgctcgccccgccctcgtcatcgttccaggtccaggtcaaagtcgccagacgacagggaccgccgtagacgtcaacacaagtctagagattccaggtctgacgactctagctcttcgtctggctcggactcggaagactcgcatgaccgggagcgaaggcgtcggaaggagaagaagcgtgacaagagggacggccgggacaaggagagtcgagaggagcgaaaggccagaaaggagaagaagcgtaaagaaaagaaggacaagaaggtgagccgcattcactctttgcatctggagcggatgtgggctgacaatccgggttgaatccctgctagaaatcaaagaaaagcaagtcgctcgccgtgacctcacagtggggaacgtacggaatcatctcggaagccgagtgagtcgaaccgagatgaggttcactagggtatcatgctgagatacctacgcttctgtcagccgtgccaacaaggacaacgagttccgagcatggctcgtcgaggaaaggacgatcaacccagagaccttgcctcgtgacaaggagaagaaagagtttcttcggttcatcgaggatttcaatacgggtgagcgaatgacctactcctagatgaggtagacgatagggagctcatgtgttcgacatccggggtgacagctactttaccatctgacaaggtgagtttgaccgacgtatagaggttcgaaatggtgattgacattcaaatatcactttctagtactacgatatggccaagtatgagatcaagatgaggatgcttcggacaggtgaagtaaccagtctgcaggatgatgccgggtacgatccgatgaaggatctgatgtcgcacaacagtagcctcaaggtgagatctcgagcatgtgcgcattgtctgttgaaatcggatgagacattgatgggacaatcacgaaacgccctccacagcgtaaaccagcagagacagatacctatctcaataagacggaactggaggagctccggaacgttcagcgggagaggtcggagatggctcagcgaaagctgttgggaatggatatctccaagaacttgggcgtgaggcaggaagcaaaagaccggttgttcagatgattcaactcctgggttggtcgtcctcttgaggcggattatgttgtcgagagaaagcaccacagctttatgatcatctcgtggtcggtgaatcggtggcttgatttcgctcgtgtctgcagtcgaatgagcgtctttcaatggtgatcgaccgattatcgccttttcgggaagcgaccgatcgatattgaccctggccctttcctcctggtgacaagatgatccgcagctgagtggcgaggcgcgcgccaggggacgaccgggttcgtcattttcgtgccagccagtctggattgcgaaacggtctgggctggctgctagcgggtcgcgagcacgaggcagtccatatcgttaccatcatcgattcgacctcttatctggtctatgtatatccttgaggtatctcgacttatcccagctatacctcgaccctcgaaatcataatccgaacacccactctttcctgcgacacccttacccctgtcataccattaatcaagcggacgacgactgtgtcaagctctcgtcactaaacaattcagacctcgatacatctcaccgacacattcacacacacttcccatgcaatattgtgaacagtctcctcggacggtctaccatgagaacaactccactgcatctttcctggcgggccataatcaaactcgctgggaatcagcgagaccgtcccctcagaccgaaccttggactttcggaaagcaatccgggccgatgccccttgcgcaacgaccaacccttcacaaacctctgccggacatcggagacgagcgataccaaacctcctttgctcctaggcaccaaggcaaatcgcgatccttggccatggccgtgaccgagctcattgcgcctgataataccccgcgtccgtttaccgcgcccgcgtctttcaacccggtcggccatcaagcgtttggggcggcccactacccgtccggaaacgctacctacgtccctgacggttccgagagcacggtaagggctcgagtctgtgtgttccgtagtgcaggttgtggtcacgcggtcccttgcctgatggccggattggagagcgtcgtcacgctgtacaacggagtcccaaccgatggatggcgcgctttggacaagtttgccgatctgaccatggtaagctgcagtgctgtcatttcatccgttttcaatcaagctgagactgaagatccccgatctcagggcccggaagaacccatcgaggaacatatcgatcgattttgcaccatcttccatgcgcactctcaagcgctcatcttctttcccgtgcacctttttgcgcacctcttcttccgctcgttggcgatgtatcacgacaacctccgcaaggccggagaatactacctcactataatcgaccccgaaggtacgcttgacaagcttttcgctcatctttggaacgtcgagcagagcttgaaattgctccaaaccatcaacaccgtcgagagaacccggaagcgaaccggggagtcacggtctggcagccggcgggggaaccccatggtatccaagtacagcacggtcacctgtaccatgtctcacccatcttctcctgagagtgacattcgtacccggatctctgcatgggattcccccaacgctcgaaaagggaacagtcctagcggtacgggacctctcagcgacgcctcgatggagatctcgttcaaccagccgattcaatatcagatgcgacctctagaatgcgatatcaagttgccaccctctcgtcaacagcacgaaggggatttcagcaacgtcgagatggacgccgtcaacatcatgatgcagctcggcaggaagtaaagaattgctagttgacgtggacaatcctcccttggtcgcctcttaacgaacggtctttcttgctcgtcaccaatatttcgtctgtatcttctccaatgattgctcggctctgtctctttccatgcatctataatcggtttgtttctcgccactatgactcgatcctgacaagagtggaacttcagtcaaccagcgtcatcatagaagatcgacttttttggttgcttacgtaatcacatttcacgcggcctcgtcgtctcggacacgtccgagagccagaagtgtcatcacaccacctccatgcatgccacatcgtttcctgacatcccaacctaggctgacccctgaccggccaggtcaagtaccatcatagcagttgttatctagtgatactaggaaaaaccgtgtccaggtgccttagattgtatcataccgctcgtacaccacgatacgctcgttcccccgctatggacacattgctcatctttcgtcaggtctcggatgaagccttgaaccgcatcaagcaatcattctccaccgtgcattaccatcccaacccgacccctgaggaggttaccgatgaaaagctcaaagatgtcgatgccatcttcatgaactggagtgggcttccggacgatgtggtcccatcctttagcaagaccccgaaactcaagttcctgcagctcccctcggccggctcggagcgggcggtcaaggcgaaagctttccaggagcaggtcggcaaggggaagcagggagaattcgaggtcaagttgtgcaatgctagcggtatccacgttaccagtattcctcaatggtgtatcgggcagacgatttcattgcttcatcagacacaaaagatgatcatctatgcccacgtgagcttgggtcggtgatgaaggaaatcgagcgtgaatggctgatatattccttacatgccacaggagaaacaaaagtgggggaaggccgatatgaaaggaccattcggagagaagggctactattctagggacgtatccggcaagaccgtcggtttcctggtgagctcggagaaaccccctttcaaccccttgatgatcgctagctgacgcgtcatccctcccggacgtctccagggttacggtactgtgagcatgacatatccaccccggccatcctgaccctcgtacatgctcggctgacagacgtcctctgggtgacagctcggacgagagacggccaggttgttcaaaccgttcttggtagatgtcatcgctgccaactcgagtggaaaggccactaaagataccggggtcggtccggaaggccggtcgtcagatgctgatatcaagctgatacacgtcggacgcttgacccgcagtatatcatgccaggtactggggatgtcaatggtgattcactgtgcatatccttttcggttgtcacgcaatcgctgatcaacgattgtcggctgagctaggttcaattccctcggactactttgcgaccaccgatgacgaatctttcaacgagttcctgaaacgctccgatatcctgatctgtagcttgccgtcgacttccaagaccaaattcctcttgacaaaggaacgcctgggtgagtgttccggaccgggccggtgggccagcgatcaaaagctgctgctgccggtttgttgttgttttcgtgctcggttgggtggatagctgatgagcacgttaatggttcgggggactcttgcgccggtagctctcttgccgaagggtgcgcttctgctcaacgttggccggggtgacctcttccgatcaggtcggtgtcttttagctcggtcaacttcgcaacccggtcgctcatgcgacgtttcgacttggtggttgattgatcttctagacgacctgttgcacgcgctcgacaacaacttgtctggcgcagctctcgatgtcacggatcccgaacctctaacggacggccatcctctctggactcacccaaacgtcatcatcacgccccacatctcgggcaacaccgagagcgagagcgagcatgcggtcgatttgctccttcaaaacgccaagcggttcgtcgaggacaaagaattcttcaacgtagttgacattcagaaaggttactagaaccacatacccgttgtagcaatcgtcccgcgaggcgagtgccggcgtttcaaagggtggagcggatgacgaggtggattcgaaatcccggcaaaggcgtcgaaaggatatggaatcgagatgcactacgtccgcactcggccgagtaaccgctaagggcgaggagcgccctggaggttttttctagctcggaaattgcccgacgactcgcgactcgggcactttttatttttgcaaaactcgtccgtccaagcgaccgcgctaatgacattggggaaggtctggagcctcgaaatcggatgagggaggcccttgccaagatggggtagtctagtgtccaccggtcggcaagacgttgttgctatctgaagcacactggagagttgcgcatgtcgaatcggtttgatcgcacgaccatcgccgccatctgtatcgctatcgtgcacatctcgtcaacgagccttgaaacagctgatcgaggaaattcttccttgcccttttccggtccacccgcccatgacgaaggaggcgtgtaatttaggccggagccgcgccagctgattaattctacctccgcgaaatcatccgcggccgggtgtaagtcggttcaatattatcgcagtagttgccgagtgacaaaaaaagatcgcatgtgattcctcatttcggttgcagatatctggccagctgctcgctctaggggcagacgtcattcgaactagcgctctgttccccctttcgaaaaaaagatgtccctgctcgacttggcgacggtcggttggaccgttgtcacccaaaccggtcggggtggcgacccgcgtgtttttccccgaatcagcggggaccagctaccccacgccgagaacaaccaggtagatcgacggaccgaaagtggctggtagcaggcagaacctcctggccatcccgcctgatgtcgatttttttcagtgccccgagcccctaaccgaatagaccgacaacaaggatgtccagggtatataggtcgaaccaattgttcgtgcgaggtatcattgccacgaccgttcgcactttcttcaaggtcaatcgagatatctttcactagatcatctttcgcgacaagccctcaagaatggagaagcaacctcaatctcacgctggagtacctcctgtggctcctgccgacgtacgttatcttttctttactgttttcgccagctagttgactgatcggtgcgcggcgctttcactacgacagaacactgttcccggcggcgactatggtatcaatctcgtcgagcccaacggtcacaaccagaaccgagaggtccttgacgacgctactctgaatatggacacgtatgaaggctccggtcctcgaccttcctacttgggtcttcgaggagatcgtctcatctggggtgtcacctttttcgctaccatgggttttagcgtacgcaaatcgtccctgcgcaattcttcgttcgctccgcgctaatcctcttcatttcgatcattagttgttcggttacgaccagggtcttatgagtggtatcatctcgtccccgcaattcaacggagagttccctgaaaccgcctctgccggtgctgatgatgtccacgctggtactattcgtggtaccgtcactggtaagttctgcaccatcgaatttagatcgtcgacccttttaattaacagcttctttgcgtccctgcagctgtttacgaagccggagctttcggtggtgccgtactgtcgttcttcattggaaaccgtttgggtcgactcaagatgatgtggatcggtgcgatctggatgatcgtcggaaccatcatcgcctgtctcagttttggacctcaatggggattcggtcaattcatcatcgctcgtgttatctccggcgtcggcacaggaatgttgaccgccaccatcccctcgtgggtcgccgagtgctccaaggcgcacaaccgaggtttcctcatctgtagtgaagcttcgaccgtcgctgtcggtaccgttatcgcctactggatcaactacggttgtgtgagtcaagactttgcatattttcctcgcggtcggaagctcatcttgtacaaatccaacctcagtctcaagtcaacagctccttctcgtggcgattccccatcgccctccaggccttcttctcgttcttcgttatctggggagccctggtcatgcctcagtctcctcgatggttgctctctaacggacacatggatgagggtctcaaggttatcgccgctttggctggtacctcgatcgaccacccccgtgccctccaacaacgggcctacatcatggactccatcaacgctacgaggcaggccaaggcttctgccaaggacatgcttctcggaggcaagaagcagaacttgcgacgaatggttatcggtgcctcttcccaagtccaccagcaacttggaggatgcaacgctgtcatctactacgccaccattcttttcgaggagcaaatcgaactcgaccgtgagctctcccttatccttggaggagtcctcgccatcatctacgccctcttcgctttgctctccttcgtcatcgttgagcgtgctggtcgacgacctctcttcctgattggaaccgcggggcaggccgttgccatgtacatcacttgggcttgtttgattgccggcggtaagccggccgccaagggagccgccttcggtctttacttgttcattgcgttcttcgtgagtggatgagtcgcgtttccacctcgctgttcgacatcgctaatctcgcgcgatttctcacagggtgccactcttttgcccctcccgtggttgtaccccgccgagctgaacgctcagtctgtcaggactcaagccaacgccgtatccacgatgtgtaactggctgttcaactttttggttgtccaggtcttgcccactatgagtgagtcgctgcggcggagatattgaaaaaaatcgcgaaaaaattccggctgactgacgcgtacgcgtttcacagctgcttcgattggtggatggacctttttcctctttgccatcgagaacaccatcgctttccctctcatctggttgttctaccccgagaccggtggtcgtgaattgaccgagatcgacttgatcttcgctcgagcccatttggccaaccgtcgacctaccttgatcgccgaggagatgcctcagttgactgctcaccagcaggaagtcatgttggagaagtacgacatcaacggtcccgatgacgccgaggccggtgctgtcacccgagagaacgtcgacctcgatatcccccctgcggagggcgaccacaaggtcggttcttacgacaacaccaggaccaactcggacgacgacagcaacaccgtcaacgagaagcctgctcgaatttaaatgccctcttcgttaggttatcaggttgtcgagagggaggctatgcgtagtgtttgatggcttcgcatttgattagcctgggactgtatctatagacatcataatgccttctgcccatctcaaatagatccatagagccttgagcgagtacgcctttttgtccaacgaatcgtagtcggcgtttgggtgtgtccccgatcatgcatcttgtcgagcggagagactggtgtcaatatggtaaagtaaagtaatactagacatagcgagtgaccgagtgatcgaggcgacctgacatggcgaccttgatatgtcgcgccgtgtcgaacacggacatatggaatagtagtgtgtccgctgaccgttgattatatttgatgccggctcggtagcagtctgtccgcgtcatacccgcattttgggcacacttcaacagtctgctacctactactggtacaactctacattcaggctgactcgtttcgccgtactttgcgagaaagccattgagaacgcagatacatgatcatggcctggatcctggcagatatcaagtccatctttcctctcgcacagacccgggtgtcaagtgtccccgaacggggggatccggcaccatcgttcaaagcgaacccagccgctgatggcggaaagtcgagcagtcttgaatatcctctctcttcggacaagccgagcgtcctcgtattcgtcagacatttgggatgtccgttctgtcaagagtcagtcaccctcacggtgcacgtattgaacgaagacgcagctgctcatgaccgaccaccaggaccattcaggagcaactgatccctctagccagagagcgtgctgacatcgacttcttcctcgtatcccaggctgatgtgagcgtcccgatgagcctgtcctttgatcgcacgtggagctcacatacttaatcaatgaatgcagaccgagacgacccgggcctacatctcacgattaccggtacaagacgcttccagcttaccttttaccatactttcttcgccggctcctcactctctctactcagcatggggtatctctcaattgtccgtgggctcagtgttcagcatgagcgtgatgagcagggtaatggagctggcgcgagaaaagggcatcaagaatcaggaaacggtgggctctcgttggctgaactcgggggctttcgccatctctgcggatggcaaggtgctctggactcatgtagcagcgcaagcggatgatgtgagcgatctcaaagctgccttgtccgccgttgacgggcaaaaataatagggtaagcgatagcatctttccagcagtcaagagtgtagctggaaatgctcacacatgcgatggttttgtgccgttcaggattcaaccgggacctcgtcacttcgaagccacaacagcagatccgccgcatctaagcgccgaactcgatccatgaacaatccggagtcgaactgacgcgacaacgaacgttctcaatatcattgtcatcccgattaatgcacgtgtaaagttgatacaatggggcctgaagtggatcataacttgccgaagactacagatggaaatattcactccttgatgccggccggagagccctgccacgatgatccttcgaacgaaccgtccgcctcggcttggtacaggatatgcgaatcgaggaccttgctccccaaggccttttcaaacgtctcctggtctggacccgcccgaagtactgtcaactgttgttgacccaagttggattgaaatatccccgcagcgctcgcagggaggaaatcttcgtacgtgactggctcataggcgttcccatcctccccctcgaaactagtctgggacgacccggagatggtagagctttgagagcctcggtaaggtcggaagtaggccagaccatcgtgacgcaaagtctcccagtcgtcgggaaaggcggcgaagatcccttctagatgtttctgacgggtggcattatcaacgggacctgtcaacccagcgagttgcttgtcggcctggtccatcagctcgtggtatagagcaagtcctgcgaagccgtgaagtattcagcgatacaggatctgaacgtctcggtacgatctcgtccgagcggtagtcacctttacgagtcagtgcgacaccacgagactcgatctcgccgaacctcgccttgtgtcgctgcaaagtcgggcgaagtttcgatgatcagcaagacaacttgcgctggcggatctctcaacatcccgactcaccccgaatttcttgcctcccgattcgttccggtccaaaaagtagatcggctcagcgacggcttggaacgacgtttgacgcagcaagatagagcagttccggtgaggcggtccctcgatgacatgtttcgagacgatcctgtgaaaccgaaccgaaccgaaccagaccgaacggacagtccgaaagaatcgcgcctataatcagccggacgactctcgtgctcgtatggctcccgcccgtcttgagattgctactcggctactcaccccttttcgggcatacgtgcctggaccgtatcaatgtccagtgtccttggagtgaggtggttgatgtggggacctttgaaggccgcgatatccgctacaagcgaatgtgcggttgcgagccggttgtacacgtcatactcgacgagggcgtcggactgccacttgaaggtgaggagagcgtggtcgaccaggctctgcgcatcactgtcgtccagacctccttgagcctcggctttgtcgagtagtcggagagtttctggatgaaagatttctcgtttctcaagcagagactcggcgagctctctgatctctacgtcttcgatcagttccggtcgcagcaacgacgtgaagacgcggaacgggttgaaatcgagcgaatgctgggtgaccgggcggaaagcggtggcgtggaccggaactccagcaatggaaaggtcgtaatagttgacgggcagcatgttcatcgttcggaacagtcggcggagcgtgtgcagctcttcaggtttgcccacccggatggccccgtgacgttccacgcggagccggccggcttccgaccgatgctgagcctgggtcttgacgatgtgtgcgttcgtgtcatccaccagcgaaaccaatgctccgtatagaggtacctcggagtgatacatctctgacagcttcgagcagaagagctggcgaatatgatcaggctgggcgaattgtgttccaggcatgttgtggaatgttgcgagataagggaggcgataagggaggcgcgcgagagacgagggggttcgaacgtcgaggtgtagaatgttgatgatgacgatgatagaccgaatgcaagtggttgcaaggctttaagtatgaagcgatgagaagctacgattttgtcgcttgcgtacccgatgccgacctgttaatggggagtcgatgtcgacaaagtcggcgaactagcgaccgatcgactcaaggtatggtggctcgaattgaggctgatgatagcggggtctaagcgcgcgcaggcgctcgctcagatccggtcggctgatccgtgaaagccgctcacatgactgaaccgatcaaagtcgattgacccgcttgattgcgaagtgcacatgcgataagttggaactcgtcgcatagatcacatgggctatcgttcaaggtataaagagcggtacacatggggtggactatcctgggtcatgcgccctcgactctgtcatagccaattccactttcacgatcatctcttaacgaacattaccgaagacacaacacgcacactaagatccatcactacatcatgccctccgtagctcaaaacctctcggtctccgaccttctctcttcgctcgacatctcgacgagcgaaaccaacgctggtgcctatgacggcgaatggtttggcaacggcgacaagatccagtcgttcaacccttccaacggcaaggccctcgctaccatcgctcaagcgtcagacgccgacgtccagcgcgtactcaaggcgtcgaaagccgcgtcgaaagtatggcgaaacgtgcccgcgcccgaacgtggccgggtcatgcgcttgatcaggaacgctatcgacgacaaggtcaacgagctgggcatgctcatcaccctcgagatgggcaagatcgttaccgaaggtcgaggagaggtcgtcgagtttatcgatgttgccgactacgctgtcggtctgtctaggagcatcggcgggaccgtcgtacccagtgagaggaagaagcacttcatgaccgaagtgtgccacccgctcggtgtcatcggagtcatctctgctttcaacttccccattgccgtgagtcgaagcaagcacgaagcaatgctgatcaggtgctgatcgcctgcgctcctttcacttcggtattgcaggtctttggatggaacttctccctcgcgctgatcactggaaacgcttcgatctggaaacccagcgagaccacccctctttgcgcgttggcaacgaccaagatcatcacgcgtgtgctcgaagccgagggctaccccggtgcgctctgtgcgttgatgatcggaggcggaaacgtcggtgccgctcttgtcgagagcaaggaggtcgacctggtctccttcaccgggagtgaagctagaggaaagttggtcggtgctgaatgcgccatgaggttcaagcagtcgctgctcgagttgggtggaaacaacgtgagtccgataagcccccagggtcagtcaagggccagccactcacgaagattgtcatcgacaggctgccatcgtcctacccgacgccaaccaggatctcgccctccgaagcattctctttgctgctctcggaacagctggacagcggtgcaccaccacccgacgactcttggtccactccagcattgccgacactttcattgcctccctcgtcaaggctttcggatcggccactaagcgtatgggtgctcccgagcagcagagcacccttatcggtcctctgcactccaagatcgcattcgaaggatacacgaaggcgatcgagcaagccaagaaggagggcggcaagatcctattcggaggtgaaaagtgggccgatgtcgaggacgagctcaagggtggaaactgggtcgtgcctgccatgatccgatacgacactttcgaaggcatcgagatcgttcgaaaagagacctttgcgcccagtgagtcgattctcgaagcgttcaagcgtcctggccgagctgaccctcgccgaaatggcgcctagtcttgcacatcaccactttcgagacattggaagaagccatcgaaatcaacaacagcgtggatcagggattatcatccgctctctacacccagtgagcttggagcgccccttcattcctaccgaccaagacccaaccctcacttatatgacgtttgcagagacatgaacaacgtcttccagtggattggaccggagggtagcgactgtggaagtgagttgcgaggtcgggtcttgagattccttccatcttggtgcgacttgttgacctccgtgatcttatatttcagtcgtcaacgtcaacgggtcagctacgacagtgttgcgatattgtttttcgtgatggtcatctaatctattcctggattgcttgatgatagatcgaccagcggagccgagatcggcggacgattcggtggcaacaagaggtaggtctagcgctctagcgttctgagcgaattgaggctaaatatcctgtgctttcttttagcactggaagcggccgagagtctggtggtgacagctggaagcaggtgagtggactgtgaaggggtcgcacgggattcctgcttatctcgctttcgtttcgatccgtctagtactgccgatggcacaccgctaccatcaactggtccaacgaggtcggtatggctcagggagtggtctttgagtagacggagtttctgttatgacgacgtgaacgcatatgcctggtggattgggtaaagagtcactccttgtagtagtagtatagcataacggaattgcaattacccgtgagacagcggcgatatttgccggcaatcatccaaactggtggcgtatccccggtcttccgcaccgttccagttctcacagaggccggcctatcggtctcgtaggactggaggtcccccaatctgttatccctagtgtaaggggaattgttgaaaacctgatccggatggatggcggtagaggagtttggttgaaaagtgcaaattttcatgtcgtctgcagaaggtatggcaattacttggctgtcaggacccctgagggtgtgactatcagcgtggagccaggccatcgctcgtgcaagcggttgaccggcgctttctcgcgaacgtcctcgcagagatcatcgatataaagtgagcatgtggggtaacggcatgattgactgttgtatgcatattgcatgttgatacctatacaagttgtaccttctatgtgggggttaagcgaaggatatagtgtattccgactgcaagccagaggaacgtcagcttggccggtcttcggaaaaaacaggttgactgcgctcacatctgatgctatttgtcgccaatcgacccatgtgttccctttatcattatctttccatatgctcagcaaaagggtgaatacggtctggatattaccggtcccggtgatcgtatgcagcttttcaaaaatggacttgaccacggatctgtcttcctcgcggatagcatccaccccagcgatgaacaaagggaacaatatttgagattgactcggggtgttgagaaccgtggagatagtggtgagcatcctggcgaccgaaagctgcgcgtcgagcgagacagcgggcatgcgatagacgatttgccgcagataagcgtgcgccgcgaacttgaaggcttgaaaggtgctgatcaacggttggggattgaacgacttctcatcctcttgccacgcagccatctcggatagcgtgcgggatgagacttcgagcaagtcgatccgatgaccaagacctcgcgcttcctcgatgacgcgcgagatttgctcgaagcggtcgtccgggtcctctaccacgtgtacagaggtagccttggccgccagagtcgtaatgtgagcgaggatctgtgatgtacgagatttagcaagagccgaaaggcaggaaattcctcaagtctcacctgatagattggcgcgcaaattcccaggtatatatctggcttggagcctgcttgtcggatgaagagactgtaggtatcgaccggcacttgcggatcgtccttgcacgccaacgaccaggagacgtcgtggtagatgcagttgagcgcgagcgagatttgggtatcggaataccgaccatctggccggcttctttgcagtagcgtgaccagattccggatcttgggaagcagctctttccacctattcacgcttcctttgcagatctacgaggagcgattgatgctgtcagagctaaacatgggcatttcgagtcaccgggcacctacctcgattcctcccagcatcagaacgatccacagcttgtcctcgagcgagacatcgccctgagtcgcgtctgacgcagctccagcttgtaataacgactgaacccttctgtctgtcacttcggtagcgatccgggcgattgaagcatagggttctcctatgcgcgccaaatggctggccgaccaaccgatcagagcaggaagaagcagaggcgacgtcgctgccagaggcagcaaggactgcgtgagcgagtgcttggagggtgctcccaggaccgagatgatgggcccgaatccgttgacaaagtactaaaaggacgaggacgttagcgttgattaccaatcgaagcaggtctgttctgcttacatcgatcagtacgggcacgtgcacccagatccagctcgggagactcgttccagccaaggacgacgtcacatgagattgagaggcgatgctcgacagggtgtgcgacggtattgaaccctgaccgatggaatcccccgcgcctttcgacgtcccagccagcagatgcgaagcgatatgacctgctcgatgagcatgaaggatgtcagctccaatcgcgtggaccacgactctatacaaagcgatcgacccaccatgcgaacgataatcgacatccatcccggacctatgttcatgccctggaccgctcccgccattcagcatgtgttcctgttgttgtcctccatcatgactcggtcctcccccacgcatcatgtcatgcccattcccgttgttcccgtcctggccgttctccatcccgtggtcgttctgggactcccctgccgacaagataaagttggcccactcggactcggactgttccatcgtcttgatgaaatcgacgagcgtctgatccagagcgaccggggtctcgatgtggggatggtccaacatatgcccggtcggttgcatgtagtccataggcgtcatgatcccagaggaagaaggacccggggctagtgtcggtcctaatctccctgtatgatcggtatgcacagaagaatggtgagagggagccaagctgttctcggagagtcgtcgttgaggccccgtcatcgcctctcgagcgtgagaagcacacgagatgtgcgcattcgggtccaagatgggcttgttttccgggtgagaggagaagaagtcttgtcggatcgatcgcggtgttccaccaccgatctgaccctgacctggaggatgaagcggagaaggccccttgacatagtcgtcgatggtaaatgtgcccaatccgcctatcgggatcctctcgatattcgggtccggtggagccagagtatttcctggtgcatcgtttgacatgtcaaaaggtcgagcatgggaaggagcagcctcggcgtcttccgctatgctgctcccgctcgatgggttccggctcagttcaggttctatgacaccacatttttcaatcaaatgcgcctgaagctgttgacatgtggggactgtggcttacgctgtgcggaacgatccgagttgggggcagcaatctcccgatgcttctttgcaaaggtgcctggtcggggtcttacttgaccggcgatcttcgggtagatgcaagggatatcgagtcgttcgctggattggacccattatcgtctgtcaggccagtggctacgaggacgatgctgaaatcaacaacctaccagctctcgcagactggatgacgctcgtcacatgctttctgcagatacgatccacgttgattcagctacgcccggtaagagacgggtctgacaccgtagtaccgctcacctttcgcctgcgacaggtaaaacaacccgttcgcttcctcgtcttcttcttcgagtcggccttgtcatctgaaacctgtccagtgtttttggcgccgacactggtttcgctcgtctgagagacggtttcatgttggtcggtcatcgtacttggattagagtcctgcttcggcgatttctccgcgttgaacagcaaaagtgtaggcgccgggcttcaaggcgcagatcagagcgtcatggtcgaccttgttcaaggccgaatgctggtagtttacgagtgtttgcgacggcatggatctcgtgatagtgcgagctgataaggagatgtagccttctctcaagatgcaataggggtacgacaacgtcgtctggcccgagcctacgaacgagcggttggccgggattggggactccacgcataatacgaagagaaaacagaaatgggtatgcgttatctctttacactgtactactacagtaccttacaactgatcatattgatcatgctgtcggttacaagctacaagagagatttgtaaaagccatatgggaaaccacgtccctgtaaagtaagagatggtcatgtcgagttatcattacagcaaataaaacggagagactcacgtaggtgttgagtttgttgagctgttcacaaccttccggccgataaggaaactgtgtcgacgcgacccgcggctcttttagcgctgaaaagctaggtaggcaggcatactcgtataggcgatttgaaacggcttggaaacacttactggcccgtactgttgcatcccgtaagcatacgaacgattactcgcggtctgaccggctagctcattgagcgtcttgagttgtcctggtgcttcttgatgcggcatggtagggttgtagatcatctccgcttgtatggtccgagcgtcgataggcaaatcgttgtacatctgattcgtcggattatgcggcatgatggaaccataggtatgatgtatagtgcgattcgggaggatgaccatcgaatgctgttgcacgggcgatcgagacgcaggaaagggtggtagtggtggtggcgaaaactgtcggttcatcgtgtgatgctgagaaacggccggaggactgcacatcatcgacgggcagatcgtctgtggcgacatgcccatcatcgacctgccagcacccccgtgactcatattcaccgccgccaaagtgtccgggaacccacccatgtgagatcctcccggcatcgatctcgccgccatcgtatccgggtaaactatcatcgatggctgtccttgaggcggcatcgtcatccctcctaccagcggcatggccgcagcagcattgttctgccttgctgggtcattgtcagtaggcagggattgttgagcgacaggcacgctctgattctggacgtgcagcgggaaggaagggaatggcgtgtggtagggcatattacatgtcgtggccacggatcataccgcatagtaccgggtccgaacgagaaaaggcgaccctggactggttggactgggccatcttgtaggtatcctgtattggaccgacagacccctttcagctctgatagtcaaaccagttccccttgaagctccctttgtcttcttcataaaggtcacgagcagtagtgtcgagccagaagaggtcaggcgatgaggtgggaattcggaatttgagaataggtcatatcgtcatggaagtcggctggtctagtggattctcgcctactaccgcctaaaatgcgcagtcgagtaccttttctgggccgaataacctgaagcgattcgtttcgttcagcctgtatctatattaatgagccctaagggggatgggggaaaggaacaggcgctttcggaacgcaagaacggaaaccttgcggcgatcaggaccagtatcggaagtatggagacctatcaccggcagcagcgctgcaggttgttgtgaaaagaggaagctcagcgcggaagcgctcggacggcagcgattcgagggctactgacatgtccttttggctccactgttcttcgatggcttcgtttgatacggcgcctcgcttcttgttagcgcgatcgtagccaatcttgaggacgatacagcaaacggtagcgatggaggcaacgacgaccgagacgatgtagcctagacggagtagcgattcagcgatggacgcactttccgactacagatcggtcgtctgactcacccgtatggtatgtgggggcctccttgctcaagtaaataaaagatcccgtaagacctcccaagcctcctgacaagatttggaacccgagggcaatgtgcttgtgaggctgaatatgggatagagacggtagatgatcaactcagggtttttatggaggagctgaccgaattgtaggctcacctctggatagttggacgcaacccatgcaagagaaggaggggtagcagagtatgcgccaaagacaacaaagaccagaccggtcatggtcaatccaatcaagccaggcttggcttcagcggacatcgtgaagatcaaccccaagattcccaacaagaatggtccagcgacatgctccgcacggcgccttcgcttgtcactgatgtgacagttgatgatcgtccagaggcaagcaccaaagtagatgggcacgggaatcaggtaagactcgatcttggtgaacttgagactcctgacgatgaccggcagactgcggtgaaccgaaatggtcttatcagctgacacggaatagaccgaagccgaaactgaaacgaacctgaagctgatactatatccgactgcggggtagaatagttcgaaagcgattcaggacaaaaaaaaaggtttaccccgatagcactagacacttacgaagcgagtgagaaaagtaaatcatcatctgagggtagatatgccacctcttcgccatctccttgaccagtacaggactgttgctctcgcttcgaggggcatgctgtccgttggtgctgaacttttgacggaggaccaagtacctctgttcatcgtgggtcaaccagttcgccttgtcctgagggtgtccaacgatcaggatgggtccgaggattccgaatccgaacgtcatgacaccttcgatcaggaaaagccatctatggtaaaagcggttcagcctttctcgtttccctcttatgtacgcgaatgactatacataccgccagccttcgatgccgtaacgaccttcaagcccggtaataccgtaagccaaaataccgctaaacgctccggccagagaggcggagctgaagaagatggcgatacgacgagcgatttctgtttcacagaaagacaatggcggtcagtgtatttgttatatcggtgatggatcgctgttgcctgagctagatgtgcgcgacttaccttcacgagtgtaccacattgccagtagagtattgcatccgggcatgattcctgtcgagagcgcttcttgaacaaactgaccagggattggtgtgaaacgcattgcaggacccaccagactcgcaaagaccgaggaagagacggaagaggataaatccggtactactgttgatcgaagcggcagaggacatgactgaaatcgtagacgatcgtcagtatggaacttatgactggggaatgtaattagccgtgggcagaggccttaccgataccacaagtgatgaccattccgctgatccacagacgaggcccaaacttcttgaggaagatctgggaggggatctcaaatagaatgtagagcatgaagaacgcggcgagacctatgagggtggggttagtctagtcataacggtgcagaagaaaaactaggtcgttctcaccggtattgtagatgccgtccgacatggggatcgaatcgagcaaaccagcgaccctggcattcccgatattgcctcgatcaaggaaggccaggaggtaggagatggcgagaggaggcaggattcgcatctgtttgcgaaacgtatactagaagcatctcagattgatccttgactacgacagatcaggcgcatgactcacgtccatctttcgcagcaccttgctccattctttggtcccatcatatcgctgatgcaagttcagaaactcctgatactcggtcgcagtgtctggtcgggcatggagctcttgcacctcgctgctgttcaagtcggtcttggaagggtcgtgcttttcggggatatcgtccgaagcaggagcagtctggctgacgggtgtgacggtattgtcgaaggaagaggccgcagccgagataggagctttctcggttgacatcgtaagacaggaggcctttaatcaaattgggagggcgaagcaagaataagaggttcaagaaagatgagggaatgagcctgaagtcgtcccaatttccgagcaagattttgaatctggaagaaatgggaagcagtcctatatacgtggaaaatcgcgggaacccgacctcgtgcttcgagagaaagagtggatcaaatgggctgacacttcggcatccggaactgtcccgcagtaacgaggactctttggatggctatctcaatatggtagcggcagcctactcgcgaggatgacaaccgatccggtgcttcctttcggtgacgggaggatcgaatgatgataaatgtggattttcgtgatggtaaaagttttcctggtcagacgagactgatagacagaaggcaccagaaggagagggatgacttggcggggatcaaggattgatggccggtggatcgatggattggcgaaactcaaaggcctttgataaagtggatcgtgcgacgaccggtgttacaagggtcctcttaggtggttcctcgacacatgacgctatccatagcgaaccttggattgtcatatcagggagctagtcctactttgatcttccaacaggatatccccgtggtatatcgatggtgatgtgacaagggtgattgatctgtcgacaagagtccatttgttcccattgaaacgcctccagggcaatgccaccaccctggcagatgtggcgtgtcaacgacgaacaagagccgagatatgaccatgtgccacatcccattcgtctgggtatccctcattctgttcttttgtgtcacctcggcagaaactcgaaggtgaaaaggaacaaaaagaaacccaggtcgacgcaaattccccatccacgtgcgctaaccacccacgcgccgcaccgaaaggggagattgaaacacgacgaccaggtgccgggtgtggctgaccagggtttcgccgggattgtccggccgctggcgaaaacttatactggtctctcgctgacagaaaaaatcaagggtgacacttgggaatacgcaaatcgtttgcagacggctgtcttaatccggctgccaatcgtcctcccgggccaagggccaaaggaagggaagatccgggatttcccgccggcagatcaatagctccaccgcttaatcgcgcaaccttagacttttgccttggccgattatggaaaggtggatagcggcgaatcgtgcgggaattgagttcaataatgattatgaggcacgggccgctcgatcgatcacagctacctctgcagcattgcgtctactaaactctatcgggaacgatcaagccactcggaaagttgaacagattatataccgcctacgtaatccatcggcatgctctattcatttgacaagcaagaagcgctggaaatacgccgccaataacccattcgtctcttgcccgagcggagcgacggttccgacatgtccgtctggccggaagacgacgacccccccggtaagcgtatcgatgccatacgcctcgtgcgtctttctcagaggatcaaagtacgtcctcccgaaaggtgcaaacccctgcaagatctcggccgtcccgatgtccgctcccgcaactatggtgataaagtccaagacttcttgagatcgagaaaaactcgacgtaaaggtctggtccccgtcaaacgattcacggaaagccgccaagccagtttgagcctgggtctgatggggcgctccggtaaatacggcgacgtagaaacgagcccaaagaggcatcgtcgagtgcaaacgaatgggctcgcccgttccaatcttgttcagcggaccgtcgggacctcgttcgccagggagtattgtcgagacaggtcgggtcgcagtcggcatgccaaatatgccgtctttttctgtagtagtattggtatatcagctacatcggggcgctactaaatccctcattgtatctcactatatgtaatggacaagcccagagtgaaattcttgttctcggcgttctcgcaccactcattgaggaggtcccgtgtgctttctcctgttcgatgtttgtacttttctggatagttcccactcatcaaggtcgcgatgattgaatcgttatcaatgaccttctggacgagagctctcctctcgtcggcataactcttcagcatgctcccgggtgaagaaaagcctttgagcgcgagggagagtttccaggcgaggttgatggcatcgtgagagcccgtgttaaggccttgcgcggagccactcgaatgagtatgacaagcgtccctatacccgagcacggatcaggatttgttcgcaatcgtcattcaattatagctcacccggccaagatggtttgacctttgacgaattcctcggcgatgcattgtccaataccctgtggtacagatatcgttagacctgagctttgttagcgggagtccataatggtatctcacatagatagtgaaccaatccacccgcttgaagtctagtcggaacggcgtgacggcctctttcgcctcggcaatcacagcctcttccctcaacgagctcacccctccattctcaccgccggcaacggtcgagcttccttcccctaatccccacttttcttgcaatgtcttcgaaaacacgtatccgatcctcgtgaggttgttatcgatagggcagaaaaggatgagaccgtgattcggagattgcaccgaattgagacatcttgcattggggatgtcggtatcaatcacggcctagaaacgtgtcgaccgattatcagcgattgaacatctgcaaatctggcaaaggtcgaaagaggacttgcatccattcggatccacttggcgccggatttggagccgatgaaacgtatcccggctagttttctcacggtcgaccgaccaccgtccgtcccgatcaggtacttgctacaatgtcgttggcaatctgagtcagctcaggtctcgaccccatctgttcggcttcttctatactcacgcacgaacactgcggacactgtcactcttcccttcagtgatcttgaccgagatcggccattccttccctttttgccaagtcgacgagacactctcatcgaccagatgttccagcttatacccgacggccaccttcttcccaaacttcctctccagcttttgctcgaggaccttttctatgagtcgttgacgtaggttgaaacagaatttgaaggccgtatcgccgatctggtccatccggtgagcgaaggacagtccaccggggaccgcttgaccgctgaccgtgcattcccgaccggttggaaggaacgcttcagccagagtctgtataccataagattcatgtggttcaagactgtactcactctcggaagttgtacccggtcgaactcatcacccctcccgcggcgaacatgtcgtccatcagacccaattgatcccaaagctcctcggtcctcggccagatggtacacgcccttccgaagatcggggaagcgctcttgtcctccttgtctgccagcacggagcgagtgtatcacggtgataccgttggtacagatgcgggtatgattgcaggaggaaacggctcacctatgatggtatagttgtgacaaccgaacttggacagctggtaggcgatcaagagacccacagggccggctcctacgatcaagacgtcggtactctcaggaagctgagtagcggtcgtttccatttggggaataacaccgttggtggaattcatcgtgaagtaccgtggctcgagcctgatactgttattcgggagagggtctgaacaccttgtccgcgtgaccaggcctggcgtgaatcacgggttctaagccgtggtgccagctttatacgatctcaaagccggggggattcctgggatgagagagtagcccaacctcttccgtctctttccgactgccgatccgcaacgaggtcgacatatgcccagggaatgatgatgaccgaaaaatcgagatccgtccgtttgccgacgggtgggtctgattcttcggcatcgaaagtctcggcagatggcgacttcaccggctgcgtgactcgggaggttgggaggaaactgtctcagcaggttgggctgggcggggctcgaggtcgcgatgacaacacaaagagtttgaagtaccaaaccagcgggacggaagtcgttcgagtgtcacatggcgtgctcgatcgatgggattgtaattatcgattaatgctgatgcttgatccggcgtctttgatgagattgatatctgcatgatggtcgtcatgatgcttattgttctcccttgtcgtccgtcgttctatcgcaattgttctctgatgaaacgcacattcgacgccacgcggcacaggggcaggggaagggtaggataggcaccacgctagctaccgcccgccccgcgcgtcgacgacttcttgtcatcccagtccccccttcttttgtttatgctcaagcgaccggaacatacaataacccgaaggcctctcatgctttaacaggtcatacgagatctctcgacatctcgcaaattatgcttaaaactgatttggtccggtggtcggctcactaagaagacgccgaatgatgactaagcgtcacttcaaaactcgagcgagggtccgcgtagacgaagaggtgagctatgcacgagctgcgtgtaggcagatcctcagctacaccatcgttgaagagatatttataaaggtctcagctaggaacccgtctgcaggaattcatcctccaggctgtccacaatttggttggtcagtgccagctgtctggaacgaggaaagtgatccaagtacgatcggttgtgtcaactagaagcgcagctgatcccccgcgcgcgcttaccgcccccctttcgatcaagttggttggtagcaacttcaggtagagcaggttgtagcgtgacccgggatagtagtgtgcgtggtttcgatggaaggacctgtatacatagctaggacgtaaagcaaccagattctctgttcctgaacgatccgctccgaccttatggcatcatgacgaggtccaagacgagagccaagaagaaggctcagcaggcgccgggaagtattcagcagccgcagccgacggaggacgccgccgtgcaacggaatgggaatgggtttacggatggccagcaacagcagcatcaccatcagcatcaccatcagcatcgtcataatagcaatgattatagccatagccagagtcacccttctgcccatcagtatgctcattctcctcaccagccccatgccccatccgtaccgaacgggttccctccttcatcccaacaacctcctcaacctcatcctcgatccgtgcatcaacaacctcttccagagctcagcgagactcagaagaagatggtccccatctcggacaaagctttggccatgctcaaccacatgctcgggaaccgggggatgatgcagcgtgatccctcaaccggagcgatcgacgtcgtgctcaataccgaactcttccccaatctcacgctccctttccctgcactcgagatcccgagcaaagggagcggagaccccgaagaggatatcagagacgttttgcaaaaggtcgcaggaggcgctctgggcggaatggtagggttgccgggcatgcaagggcaggcgccaggtcaaggtcaagggcagcatcagtctcaacagcagatgatcgggaatgcgctcggagctggattaggggtgggaccgggtgggaaattgccaaatttggaggatctgttgaagttgccaatcttccagaccggaacgtgagccatctttgggggaatgagggtcgtcagtcgatcggactcgggaggctcatcgattatgtggtattgtctgcataggaatgagaacgctccggcgctctccaagtaccttttccaaccccacccttcatcttcggcgccttataccgtctctccggctcaagctcaggctcaggcacagcaacagcaacaggcagccaagggcaagaaccggcagcaacagcccctgcaacagtccatccctccccctgcatcgaccttgcctatgccgcaatctcaaccgcatcgatctaccgtcccgccttccgcacgaaatccggcttcggacgtgtccccggcacccatgcaacacgtcgatgcgaggtcaccgcccccgggtctcgtcgctgcgggttcgggaagcaatagcagtagcaccgaggagctgacgcagcacatgtgtccgcattgcgacgagatgcacagttcgcgggcgtacaccgacgaggaatacgacgaggacgatgaagagtacgattcgtactatgcgtcagaggagagcttcgagtacgacgccgaggatgacgacttggaggaaatagaggacgacgaagggttacacccggacgacgcctctcacttgtcgcacgcgccggaatcgtacgacgaagatgaagaagacgaggaaggtgttgatggcgaggtggatacgttctcgatcggagagatcgaggacgaactgggtcctgagcgggaggacgagcgggaagaggcgagagagttcttcagccgggtgtttggcaagggcaaggaaaagcaacgacaggtcgttcccccttcttccgcatcgccgggtggtgctatggcaggggctggtggcgatccccagcaacaacaacagcctcatcatgtctgcggacccgaatgccgggaacccactccgcgacagctctccgaggcgaggttgcaaaaggaactctttttcgaaaagatgaaggtcgccttcatgtacgacggatggccggaagagctactgaagaagaaatggtccgagctgacggacaaggagcgagactatatacggcggaccgtcctagcaagagcgacggatgggccgatatgcgaggatgagaagagcaaagcgaggttgatgaagaaagggtggccagagtcggcactggacaagaggtggtctgagttgacggatacggagcgcaagaggatccttcaggtcgaagcggcgacggcggggcaagacgatggactcgacagagccagctcgaacgtcccacgagaagcggtaccaccgcatacgaacggggcggcagcggtaccacctcagatgcctggaggatggacgggtgccggtgccggtgccgttacgggtacaggaggcaaaccagatccagtcttgctcagcgtgggcgggaccttggtggaagacgctcatcgagccgatgccgacgctcttcgcgaggcgatcttgcagtacggtagcgtcattggaccgtacaccgcggccaatgctcaagacaagttggcgtttcccgagattaccggccccaatggtcaggccacagccttggatgagccaaccaaggccgaggtccgcaagaagcttgctcggtttcacgccaaggcgaccgagacggcgaaatggataatgagccacctcgagacgtcttcgggaatcgacccgtaccttcgaggatcgctcgaagaggccaaacaggtctttgaggatttcaggaccaacttcaaggtgcccgactttttgcaggagcagatggacgtcgcgacgatcatgtacgacgatttaaacgggacgaacctctcacagttgccccccggcgtggactcgagccagccggtcgaggaggcacctccgacgaccaacgggacgggtgaaggcaagaaaaagaagaaaaagcagaagaaaaagaagaagcgaaagagcggaactggaggccaacagcagggtcaaggcgatgatgatcgtgacggtgggaacgacgaccaggacgggtcagaggaggaggcgggtccaggaggcgcgtctctgctggacaacccggagaacatggtgagtgtttcgcttcccttgcagattgatagcctgtcacatcactgatcgggcactttcttccccaatcgcaggactgggcttgtaacgagctcttccaatggatcaaagccgttgtctggtccatcgaacaagacgccatccgggctggtcgcgctgccgccgtctccaaatccaactcgaacaagaagaagggcggtaataaaaagtctgaagacgactttactacgagtgacattcagatcacctggaacctacctgaacagctgggaagccagactgatcagaccaaccctggcagaggtcaacaggatgcgggcaccaccacgatcacgtatacgcctacacccgctccggacgcggaacagcttagggcgaggctgaggagcgttggggtcgaagtcggacccacttgaaattgattgtcgttcgttcatgccctatcagccagacactacttgagctccttgtcgcaggagagcatgctggaaccttccctgcacacgcttgtacacacatgaccatcacgagctcatccatcatctatgcatgcatgcccaaatctcgccttgttgtttccacctttaatgggatgacgattgctcgtcgatcgtcatcatctcttgtccggagactgctatcatttcgcaaatggtcaatgaaccaactagattaatcttttttgcaatacggagcccatatcgcacctgacgtccagtcattccactcgacgtcaaactcagatcatggccaccttcaatgtaaggcagaaattctccagcagtagccagttttgtatacgtcaggctgatcgacagctcgaacgataataggtacgactccggcatccgaaaggagcgacagtgctccagctgagccccgagaccacttatgaagagcttcagttgatggtgttctccgctagcgatattcccatcgcagagcaggagcgtgagtctctcaccgtggttctccttcagcttgactcgcagcgctgaaccgagccattgcttagtaaagctcgggtatcctccaaaacctataccttcaagcacggtaggagaaacccagatctccacaataccaatcaccaaaggagagcagattatcgtttcctctgtcccatcaacgtcgacatcggcgtcgagaggggtgaataatccgacatcgcaagacaccaaacctactactgcaaccgatgaacccaaaccaaagccctccaagccgacagtatttgcgcctaacaagtctaccctgaacactctctcctccacctcgtctacatcagcttctacgccggtcgccccagctggcaaagaaaccactgtcgagcttcccggtggagccgggataatgcagcatcggatagtcccggatgacaactcgtgcctgttcagctcgatcgggatcgtgttcaagggcggctacgacgattcggtgacgagacaattgaggcaaagtaagtcttgattcttctatctcgaaacatagaatatcttcctgagctgacgagtggctggcagttgtcgctgatgagatccgcaaggacgagatcgaatacccggaagtggtgcttgggtgggtattccgggtcgtacacggttctcaagctccactgatctccttttgacaacaagacgccctcgtgacgagtatactcgaaccatactcaagccatcgacgtggggaggggcgatagagctagcgatctttgccaaacagtgagcgctgagctggcttctaagtcctgtcatctgcttgctaagcggacaaaccgtgcactagcttcaaaaccgagatcgatagcttcgatgtgctttctggacgagcggacaagtttggagaagggcagtacgattcgaggtatgttcgtgacgatcattatcacgtatggtcgatcagctataagagccctttacaatccggactttatagatgcttgctggtttattcgggaatccgtgagtacccgggactgacggtactccataatgtcgcgctcacgccagacatatttaccggtcacagactacgatgccatcaccacctcgccgatccccgatgccccatctgatttccatactaccctctttccggtccgggacgataccatcctgcccggcgcgcagaaactagtcgaacagctcaagaaacagcactactacacagatacggcaaacttcgatctgaggtgtcaggtatgcaagatcggtttgaagggagagacaggggcgaggcaacatgctatgcagtgagtcttctatcgggatgtttgaaggatcgacatcaaaattaatcacgtcttcgctcgtgatacttagaacaggacgtaagtacttcacatgcatttctgactgataaacccgtggcggatttcgctgaccatcttacctctcatagatgtcgagtttggagagtattgagtccaggactccacagttgtagcacgaatcggttgatgtgtcatattgtatggatggtcggaaacagcctgatgtgtgtgtacttgggagatgtcacggttgggatccgcgccataagcactctcagtctcgtaactcctctcgaagcggcgtccatgattcaaatttgaggggtgatacgtgttgcccaacagtgagaatggagctgtgcggcggggacgttgcgcatgggatgaaagtgcatggcgccctcccaatctccactagcaagaagtgcgacatcgtcgtaccatttgagaacggcgatcatttccagagtcacgtgtagttcggtcatgatgatctgctgtacccgcttgggccgtcgtccctgacaatgagcgtagtcattattatcgtgaggcgggaagggctcttcctaaacttgtaacaagatgattgtctaaaggtatatgtatcaaaatgcaaaaacgaaaccgaaagggttccagtggcgcagtcgtatagcgctttgagcttatgcggtaacatgtcggtatctcaaaggtcgagggttcaaatccctcctggtacacaacgctgttttaaccgctctatctaagagaacaaaagggtaatggggtcctttagttgatccaccgttggggctgatggcaaagtcctgatgagtatcaaaagtattgatcgcttgcgcggcgaaacgcggcgcgcgaaggaatggccgtgcacgaagatttgaacccctcgcaagcatgcagttcggcgatttcgttcttctctctgtctgccgtgggagataatgggagtacaagggaaatgctctcggagcagccagctcgccagtattcgaacaagagctcaagtctccaaaaggtcgaccgagatcagctcaatcagaatgcagcaacgattcatacacagcaggctccctttaaaattcgagcttgctgtttctacgtgatcgtaatggtggcatatgcagaggtgatacgaatggcatgcacgtgatacaactacaagatggggccaggattccgttctgaccgaaaagtcggtaagcctctgcttttagcggtatgtgttctgcgtggaaaggacaagacaaagtcagccccgataattcgacccaagactaccgactgttctcaccttataaccgagatatgattctccgcttctgtaagggtttttgccactatttcgtttctgtcgtcttgctgtcaagccatgctcctcgacctcgggctctggtgcgaatagttctccgcgttttcgcatccccgcctcgatgagcggtctgagctggccaatcgtcttgataagctttccctctcttttccccttttcactcaaccagttgaggtaaatttcaagctatcgattcaatgcaaagaccggatgagagtcgaaattaagtacccacttccacaagagggtttcttacctgttcgggcgtgtcgatcgctgcccactctccctgttcgagtcgatctccctcgggttcctcagcttttcgcttagcagctacctcttcttcatcaagctcctcctcttccatcaggcgtttgagatctgcttcgcttggagcttgaatataaatcctgccggtaccgtaaaccgcctctccatccgcgccgaccaagtccgctgtgccgcatccgtcgagccaccagatcgtgtgcaagaaccggtcttgtcccagggggtatgtgcgcatactgttgtactgtcttcggaactctcgagccaattctgcggatcgcgcgaccagtcgttcctcttcttccttttcgagtcgtctagctttgtcatccgctttcttcttcttggtggccgcctggaactccatctgcgcttgcttggcctccatctctttccgttggcgagcggctttgaccttttcctggcgggaaatgccggcagagctcgactcggcttccgaaaggctactgtcttcggattctttagctgcaattgagggtgtgtcttcgccttggccattgagttcgccgttcatctcgggatctccttcaggcttttcgccgcggctaataagggtgtacagagatcagcacgaggtgtcttcgaggcggttccccgcttgacatacatctttgccaattctcgcttgtttgcgttctgatcattcctgcatttcgagagggcgagtgccgcttgatcgtagtagtcccggatcactcccgtctgcatcgttaattcgcagaggaaagcaacgatctcaagcttgaacacagagtgcagggcgaggtaacgggcggataagttcttggcaaccttcggacgggtagaggcagccgaccaggtaggacggccggtcggcacattctctgcttcgagcaacagccccaagagataatgtatcaggttgggcacggaatgggttgtgccacgctgcgaggttattctgtaaatcagccgccgcatgaatcttgtgttccggtcgctgtatgacgctgacctgccacaaacagcccgccaacatcccctcccaatctcttctgccgacctttccattcgtctccttgacaccaaactctgctgcaagtatcccggcctgagtcgtcaccagcttaatcttttcctgcttgtcctcgtcatcgtcgtcgtcctcttcagattcgtcgctcgagtctccttcgctctcgccttcctgtgcgggtgggacagcacctttgagcggcaatacgaggtcttgattgataagggcatccgctctgatcaagctgagcagggtctgatggatctcttggagtaggacgcatggctgggctgggttggtatgataaagtgcgtgctcgtattcgtcaatcgtgaatggggaaagtccgaggggtttgctacagcgcgaacgaagcattgtcagtcgttacgtctggagcgctcctcaaacgtactatacacctacgagagagcgttcaaaaagttccaggtcgtaacaaaagtctcgaaatgcatcgggaatggaatctcgctgctgaaactcggtcgtaccaacggcttccccagcgtcttgtctcgtggcgtgtactcaacgaggtaatctatggtgagacggatccgggtgttggtataagtctcaagcgatacgacgcggcctgtaactgtgctcaccctcggcggggtacttcatcggcttctttttcttcttttcagcctctattcgcgcagcctcttcttcttgctctttcttgatcctctcctcctcggcttttcgagcagcttcttcggctttctgagcggcagatttccgctttttcgctagcgagacccgtcgactccaatcagctactcgacgctcgtgatgcagccttgttcctctacataccggttgcagcactcccttcgaccttttgtttctttgcgggtgggccttcttccacgacttccggtgctggagcgtccttcgtgctcgttctccttcgcttctcaatctggaccttgcgttctgcgtctgaaattttttgcacgtcggctggaatctcggttgatatgccatactttctcgcaagcggttcgtgcaccagccaaggcgaacacagcatagaatctcgacctagagagtctctcaacagcctcttgatcgccagtttcgaaaactcgttcttgtcacgactggaggcatcgttccatgatcaacaacgacgtctccacggactgagtcgatccaggtacacttacgagattgcttcaggcccgacctcgatcgtcctattgccccacatgtccgatttgtcctctgcgatgatccgcctactgtttcgttcgaggtcttccgacgagatcaactggagcatgtaccggtaagcgttgggatcgtccgccttgtctgcttcttcctgcgtgactcgagagttgagagcgccagcatgaggctctcgcctgacagcctttttgccgttccgactcgaagttggaggtgaggacggtgcgatgacttcggcaatgttagcgagatacgagtcctttccgatttcaacaaaaacctctgagaaagcgatgtgacgtgagtcgcgtcaacttgcaggcccggggagagagcttcgcggatcatcgaaaacaccgactcactctcttgcgggaagaaacggttctgcagcctcgcaaacgtcttgtccattaacccttccagtcgcccgtccagagctgtaggaacgatgatactcagccttggcttctgaatgacgctttgaccgcgagaccgagactcacagaactgcgacacacgtaaacaggccttcttcagtaccgggggcagacctccctgcgctgccatgctgttcgttttttcgccctcgagcgctccgaaaaaggaagtgaccgtctctgaactgttgtgcacgttgtctgtgacgaagaggaacgatcagcagtctgaaagcacaagaacgcgccgtaaaaacgagacgtactttccgagttgaagactacgattgacaagtggaatagcgaacgaggtcaacagggtcgaccgtatctcgaccgaccgttccggtacctactcttccgcttgtaaaacagtatccgctcgacgtatttcctattgccccaccctatgtatcagctccggcctcttccgtcccaccatcgtgaagtcgcgccacagactcactcgtagtcaaggaagatctctcccgtctccttgatataaaacacctcgggctccttccactccttgtctttctgcgaaaattgtcccagcgtaggcgcggactgggagacggagcgggagctcgaaccgttgacgtcctgggtatggttgcgggtgtggttattgccattcgtcttcccattagtatggacaacatcgtcctgcttgtcaagcgtccgggattggaaaaaatccaacaggtctcgctcatttggcgtagggaggtccgtaagaggcatctctgccaacgcagcctccaatccttgttgcagctcttgctcatgcgtcaggatcccttctgaacgagcagaggccgcgtggagctcggtcccgttcacttcggtactggcgaccgtgctcccgatctcgtcgacgtccatccccgagcccgttgtctctgctctggccgagacatcttcgacttcggtgggaaggacggaaggtcgacctgaccgtccattgacctttttcgaagtcggttcggcgaggagagtctccttgtgtttgagcttggcggtctcggtaaaactgggaggaaggacggggaggaggtttggcaggggaaaggcgagaaccttgtgccgcaaaagtcgaggcatggtgccaggtccagagagtgcgctcggtggacgtcccgtttatctgagagtcactcgggtctactgcgtcgacgtatcgtgaaaatcatgtaggtatgagacggggaaaagacaggatgttagaggatgacgcgacctgataagtctacgggaccgacacgagctgaaatgatgggagtactcacgaccagacctgctcgggatcgggatataacgacgtccgctccgacttgctgatatgtggacctcgtagagtgtggacgggttcggcgagatagggaaatgggtagtatgtcactggcgtcctactgtacgagatttggcgaccggaaaaatggactagcctagcgggtctccaggcaagagtaggcggggtccgtctatctgaaaatgcgatcgatcgaacgtcgtgccgggtgaactgtgaggtcgtcgttgtcgcatgattgagcgatggactagatagatcctcgtgacgaggttgatgtcgacaatgataggattggtagatcggagcgattgggggaggcatggtccataggaaagagagagagaagggggaaagaggagcaaagacaacgtaaacacccgctcagcttgtacagaggaccgaccacacgtccagtaaagacgcgctctcgacagtcacaatcagctcctttaacccatgaaatcaaatagcacgacgctcatgtctgttctctaccatcctgcctaatttccatgccaaacttgtctcgtgacctagcttacagctcgtcgagaccgtcacctatagatgaccttcgggggaaatttcgctcgcgggcgcgtttgatctcaaccccgagctagcgagaatgatgcttcaacctgagcctcgtcgcccttggaaagccaaggtcgcatggagacgaccctttttggtaaggcttctcgaaatggtacttgacaacgcatctcaattacactaccacggttccatcgtcaagtccatttgtaccccgcaagtgattgttgtgcacacttcctagcgcgacgcagccgcgtgccggcgtatctctcccctgatcgccccgcaagcgttcgacaccatcctagcctatggctgatatccccgcacacaaaacttgctaccgagatctcttgtccacgtctgacaaatgactcttgatcgtttaagcccaggaaaacgctggaaagagttgaatgtatgcttcagcatcagcgatacggctctcttggcctctatcgatcccctatccgcattcgggacctttcgcttgaagcgcgttcatctcacaagtctcccatccccgtgctagaagcaaccgcagcgtcagcgtgtcaaacatcgccgccgtaacatttggtgctcgaccgcctagtgtctcactcggaatgttaacgtcaatcgtcgtgcccctgagatcatctccactgtcgtagcttcaaggtgtatttcccaaggcctacctttcgcattgttcgacagtgcggcgcagtagtaattccagccaaattaccattagggaccaacgcatgcagagctcgacctcgaatcctaaccccagggattccgaaatggctactcaccaccgtcacttgtagattgtgcgacgatcgtcgacgacgctgcctcaacgtctgcttcacgatgaaccttcagcacaataaagtcacacatcctcgacctgtttagcctatccttccttctcagccagggatcggtcttcgagctgattgttaccactcgtattcacatcgatacagtttaattcttggaaaccactacaaacgccggagaaccaccccaggcctgccctcttcgggacgtactatattatctactcaaactccccttggccttgaacggactgataacccgatgatcctaccatgcccaaagactgattcctacgacgatcccgacgacgacgcctatcgaccccatggaccctgatcttacgtgggtatcccttggtgaaccgctggtcgactcggaggaaagcacccgaggttctctgtccacggagggagaggtaagcaggtcgaacgcgtgggcccgatcggagtttggggatagggaggtaggtgctcacgcggtagcatagaatcctcctgctgtggatgtatatgtcgggggaagcttgtattgcacctcgtgcccctgtccagtagaaaaagaaatccgatccgatcagcccgctgctacctctctctctctctctctcctttagcgaccgggatctttccccgactcaccgcctttctacacatcccctcgccgtactctacggcgtattgaacgtcccacgtccccttgcactgagcgaccaagcatttccccatcgtctcgaggtagacatcgtacaggcagttcttgctgatgaaactccactggttgaggttggtctcgtgcgtccagggtgcggggatggattccgtgacgtcgtggttgcattggttccagcagtctgtacgattacatacaaggatcggtaatgatgcgtggggtacaaggtcagacgagtcaggcccagtgaaccgacaagacaatacccttcaggtactcacggctgacatccccctgagcggtatgcagtccaaactgctcggccaccgaagacctcccctgtaccctcgtcgagaggcacaagagaccgagcacgatcgtgctaaatatcaacgacttgagggaaccggaggagcgaggtttgcccgacgttgtggtaatgggaaggtgatggtaaggcatcgtgtgtggtggccgggttgctaagagcgttcgttcgaggtgagaggtcaagtgtatgagcgctgttgaacggctgccactctgtttggtgtatgtcgttcgataactaaaaagatcctgaaccgagtctctaactcgcaggacgcagatatataaaaccttgatatttgacatgttcccgacctacaaaaaaaggaatgtctctgaccgccccgagggcatatcatcttgtcccctggtagctctttgttccctattcaagaggacaaaagacgaactcgacctcgatcgctcgccgatgcccgagcctcctttacatacacgtcgcgcgcgtcagctttgtctcaataaagctgcgagacgagaggaaggcaaaaagaaatcaatcaatgaagacggtgcgattcgaacgcacgacccgaaggactagcgaattaggtggaaacctgaagctagcggattaaccactctcccacgtctcctctgtggcggaaacttcgcaaattgtgttgagtatcagatccgctcagccgagctctttgcgatcttcgccctattctgtcgtcgcagtcaacccggagtgcactaaggtactaaattcctactatggcaaacttcagctcattccgcatctatcatcttcgacgatcgagacacatcttgctcctcggctgatgatggcatccggcgggaaaggaaaaaggtgggatgatggcgatcgaacgcgactcggatccggagagagcgttgcccctgtcacacagtcaatcgtaatcgacttggggggcgtcggccttcgcgacaaggaaagacgtctgctgtgatgccgactcgactgatgactgactctactttgagacgagtactcgcagccggccggtgtttgtgatttccctctgtgtgtgtgtgtgtgtgtgtgtgtggcatgtgtggtgactttgtatcgtgctcatgaacatttcggattgcggggtttctcggttggagcgcggcgccgagggcagagagagacgacgcggccttgctgggacactactgctgggattacgggttccctcgacgatgccaccacccagagccaccaaccctgctgctgctcctcctcctcgacatcgactcgggattcggattagctttcgtactcgactgctgctgctagcttactgcttgcgatcgggaccaattgcatctcgcctgttcagagtcctgggatgttcatttctcccccaccggccaccgcatctccccttttacttgaattcaattagcaagcaaccaagaatcgacgtccgatcttgacctttgatattcctaccaccccccatacccatacgcgactgacctttgaagacggcactagggtcttcccataggccgcctatcagagcggatcgtcagctttgaacagtttgaggtatctacacgtagagaatgggtgcataccgacctataagagcgacatctggtgatgggatgcgtgtgtgtgagcaggcgggcgtgaagagaatacgtggtcagaaaactcaaatccgtaactcacggccgggacgactttcggtcgggactctggcatgcgatattccgaagcatcctcgttccttgataatcgagcgaagatgcggtgccatgatttcgtttgcaagtagcggtacccgtggtgatccgctcggggtgaagaccaggtcggctcgaagtccatcagctgggaattcagcggcatcgaagtcagttccagagaacgtaataggaacggtgcgacgagctggacttgccgaccatgagcacgagtctgtctgccaacatttcgtcaccaacctcccgcaccggatgtgaccgttcgatttgcacaatcggcgaatgaaagtaggtgtcgaacatggccagaaggtaggtcaagtgtagaaccaaacctagtcctactacagtccggggcgagctcggaaaggcggacatggcggcgaaggggaggatcaaacagtgatcctagctaaggctttattctggctctctacgatatctaggtccaccttgtctacagtagtacttcgatcttgttttataatgctgttgtgcaacttttgtctgcacaaaaccgaaggtcgaggtcgtcccgaggttatgagtaataccgggatcgcttccggtgcacgtcgcttgacccggatgcaaatggacatggcataatcttctgtttcacacaggttgttatctgtcacaacaccggcgagagcaatactgcagaacggtcttgcctcgggtctttccttcatcctctccttcatcttgtcccttgttgatccatcgccccgaagctagatgataattgactgaacataagccatgaagaacgatcgatcgtcctgcgtgagacctaaacataaatgacaaaaagattacaaaatcgaaaagacgtcccatgtgcgtccatggcctttatagcaagaagacgccgatcgttcacgactgtcgccctacaaagatcaaataagtttctccacgcctgatcctgcctgactggggcttgtcgacggtaatctcgatagtcgacaaggccgaccgggacgtcaccgggacgtcccacttgcaaccaccggctgcgccaccgggcttcataggcaaagtcgtccctgatatgcgtcgaccctcatattttagactgaaattgggcacagcgggcgcgacgggcgaatcgatgtccatggccgaaccgcctgtcgacgtcgcagtcgcctgcttgcctagatgtgcgataatctccaacctagtcgtctcttgacgtatcgatgtcgaatgattggtgacaccccgttgattacggagacgtaccgtcttgagctgtttcccaccactgctcccggccgcgtcaaaggcaaagtccatcgattcgatcatgggcaatgccggcaacggtcggcggaccaggggtaccacaggggcctgcggtctgggaggtggaggcgccgggttcgctcggggcgggaccgaagtcgtcggcatggtatggagaggatgtcgctgtgggtgacctggtgtcatattgggcattggtccgggtggggtcgaggggaatgaagggggtttagcgatgggcatcggtggccgaggcatagtcggtgctggagagttcgccggtcgcatgccgggagcgagcggctgacgagactggaaatgagctgagggtcctgtagttccgatctgagacgcgggacgatgcggcgtagggggagctaccgtgctcagtcttggcgagggagtcgaggtgttcacgaccgatggcaatgacggccctgccttcggcgtgctaatctgaggaggaaacggcgacgcgtttggtcgagcgaccggagtcggaggtgcatacggggtggccccggaggacgaccgctgcatgactgccggtcttggggcaggtgtggatggggtctgcgctccaccgcttggtatccgaggcgtcattggcgctcttggcttctcgttgtgaggtgcgggagctttgagctgtatctttggcgtcgaaacggggggtactggcgacggcgccgcaatcggcgtggggttatgactaggcaagactggtgccgggctaggctcggccgacttgacaacgttaaacttgagcttgggtccggatggcagctgagcgtcgacaggaggcgtgatccctagccttttgtacgcgtcctttacaatgtccgtcaacagtttctgaatgggtcaacaaaggatcaaatcgcgttcagcctgccactcggaataacaaatgcgcgacgtgccgacctacctcgacttcttccgcattggaatgcacgagacttcctggctcgttgtagaatttggcgttgtcgcacatcgtcgtcacgtctctcgcccagtcctcgatcgtctcgtacttgttcttctcggccttgttcttgtaggtggaatgggatgggacatccagtcagcccgtacacgtcgcctcgtatgataccgcaggactcactcgaatttcctttagactgatgggcatcttgataaagaggtaatagtccgggtaatccttcttgctaggcaaggccatgaaaaagtcggcgattttcctcggtggggacctgttccgggcatcatccaaccttttctcagccacacggtccacttggggcgacgagcgtgtctctgaactcaccctgcttgagccgtctctattcgcttattccccgccttgatcagcttgctcaagttgaactcggactctggctcgctcatatggacgtccttgtccttgtctgccagacctgaggagacggcgcccgatgccctctgaggattgatcccgagcttgatcttcttggtcggcctgataccgtccttctgatcctcttccttgacatccgaggtcgcaaccattggctgcataagctcgttattgtccgatgacgggtggggttgatcgattgccgaatgggtggcctcgcggtagagatgattagtcagtttctgcacagaacaggaaatgagctcgacctctttgtggcacgctccgtccgaacgatctgatttcgcactcacgtgcaacctctgggcatctgtataaatgcctgattctttctgattatctgtcatcaggcacaaccacggtaagccagctcgttcgatatgatcccatctccttggctgacgagcgggactcacatcgcttggcattcccccagatgaggtcgaaatcccgcttgacctggtccaaatccctgtacccttcatacttttcctcttccccctgcaccgtcacaccctggacggcggttccagccgtagcagcattaggcccattcagtctgagcttgactttcaaccctgccgatccatggtgcgtggccgtcgaacccgtcgccaggctcgtccccgaaggcggcaccccgttcgcccccgggtgagctgtctggaagagcttctcctcgatgacgctcaacgacatgggatgcttgatgagcgcgtaatagtctgggaattgacgtttgttcggtagaccgatgaactcggatgcgaggaatcggccactattcgaagggaaggggggaaaggatgaaagatcagctcgaattcccgtacaggggtgtcgtgaacatggccggctggacttactcgggggtttgctcgtacatgaccgcatcgtacatctccttccccttgaccctagccttctctctccgttcggctacctgttcaggcgagctcgctgtgatcgtagcgttcccatcgatctcgcctcctgggggtacagacggagatcgtcgtcgtttgagtcgactgccggattcggcctggatgatgttgtccggatcgacgtcgagtcgacgtttacgctggtgatgatgttgttggtgttcgtgaacgtccgcgggatggttcggaatgagaccggcgttgtggatctcgttcttgaggttggtggtcgtcgttgtcgtcgcgggggtcgaactgttaggatgagtgtcgtcggtcccgtgaggaactgcacgcctcgtccgggcggacatgtcgaggagttgtttgatagttgtactttgcaggtgaactgtacctatctccacccagagtcaacaaagttatggctagagtgcgacttgggtcgacacgggcggtcccgaaggtagcgggtgggcgagcgagtgagcgagttttgatgaacccttttgatccgttctgtcgaggggggccgcgtctgtaccgatcgcgcgtgttgtgggatgccgggctacaggatatgcaaagatctgctcggatccagggactagttctagacgatacttacgacaagactggtcgcttgcagttagtgtcacaatcaccagagtgtcaactgctcgctcagttctaccctctttgatgagatgatgtcctttccatttctctcaacctggtggtctgcgcgcgcgcgttgacgcgaccagctgctactgccactaggttgccgtaattttaccgtaaagccaatcctcccatgtcacccctcctctccccctaccctacatcatctacccacgcgcgtcattcggaccgatcgctgctctcgtgagcgtactctagcgacctaaaggccaaagctgatcatcagctcgtaccaccttgtccacggtccaactacttgctccctacctactctatcagtcgagcccgccatatgaacaggtaaaacacaatacggtcacccaactctatcgttcgagtgaacatccagtcgcttgagcatgttcaagaaatccgcgaaacaggtgagctggccaacgaccgctccacctcagccgagaccaacctgatcagtagtgacttgcgccctgatctgtgaaacgtagctcgacaagctgtcacaagtaagcagatcattctgatcatctcttgatcgctcgtactgatcccacgtgcttggtttccgctcgatagtggacgggggagacgttcttcaaggagggcaagacggagttgtcccccgagtttaaagagtttgaaaaggaggtagagctccgcaagaatgggattgagaggtcagtgagatcgggtgtttgacgtaactacgacggcgacggcaacggccacctcgcacccttcatctcccggactgaccttacataccctcgtccatcacccagactacacgcgacctcgatccccttccactctgggctcgcgaaacggaaacccaccccagacccttaccctaccgactcgcactctgccaaggaaaagatcctcgcaggagaagccctcggactggtcatgatctctcacggggaagaccttcagaccgccgcccgcgggtacggagggatctcgggggaaggagccaagttcggcgagatgctcgagaggttcggaaggggcaggtgtagggtcgccgcagcccaggaagagtttacgaataggttgggagaaaattacgtcgcagggatggagaacgccttggccgtcgtcaaagaatacctcgcccagcggaaaaagctcgattcgaagcggtgagtcccggggtgctctctggaggaggcgagggatgtatgggtcgtcgaaacggggtcactcatctgtcgactggaattttcttttatagactcgcgctggatgccgtgactcgcaagttgaacacgagcaaaaaggagaaccgaggtctagaggaagaggtcaacgtggctcaggccagatagtgcgttcgagattgcgttcccgtttcagaatccactttgatggctgacgatcggacgctcgatcggtcgatgggacgtacagcgaggaagcacaggaagatacccactctcggatgatcatggttcaggattgcgaggcccaacagatggccgaattgaccgatttcttggaggcagagatggactttgtgcagtcgtactacgagatcttgaccgagctcaaatcagactgggagcgaaggttcgtaatctgctcaatctcgagctaagctattaacgaaaccccggctgacgaccacggcttgacggtcgcagcggctcgagcgcgacctcgcgtccacgatctaaatccacctcggccgtaccgaaatcccagccgtctgcacctagcaggaccacctcgtcatcgagattgagcagcatgttaggtggaggtcggcctgccttgccttcccgccagaacagctcgaaaccgacttcggatgacgacgctggcggcaactcgcgtggcaatcgagatcgagcgttctccaatgccagcgcgagcagtaaaaaggaaaagagatcctctttcattcctaaattcggctccatgggcaagaagaataccacggcgacgtcgtctggtctcgtcagcaaggaaaggtacggctcgctcgacgatcgagagggtctccgagatggatccgagcacgaggtcggaaggctcgcaacccctagggacgtggacgactcggatgatgacagcgatgatgatcggtatggtcggaaagaaacgtatggtcgagcgtctcctgctgcagcttatgcggcaggcggtcgttcgaggagccattctgatctttctggtggacaccctcgtttcgtcgcgggcggttcatcctcgggtaccagtaccccgccattcaagcgcacgatcactatccccgctcacaacacgatcgcggagagtcgcgagtctcacgaaggcgggaggactttggtcagggtgctctacgactacgagggcaaagcggcggacgagctgtcgatccgtgtgggcgacattgtcgaggtcacgcggaccgtctctaccgattggtgcatcggtgaaaacgaacagggccagagcgggctcttcccttcgacctataccgaaccttatgagcagcaatctacggccagaaaggcgcctccagcgttgccggtcaggacagcaagctcgttggctatcccgaacgacggagcaaggaggacgcctcccgtctttggtgcgccgatacccggtagcaggtccccgggcggcaattataccaacgggagcgccaggctggcaccgcccatcgtcacccatccctcttcggacacagagaccgacgaggatccgttcaactaggtcgctagacacgacccggattcgactttgttttccatgtaccggtactgcttctcttgataccatcctcgcgcttctcgccttcctctttgtaaccattaaaggtgttaggtaggtttccactttgtactcatgggccgatacaagcatggtcatcgatgtcacgacgctactcaatgaagctttcgacatgatgagctgctgtccagtgcgccagccgctatgccggtgagctcgggggaatggagcgaacaaaaggggttcatcgcgctcgtcgttgagccatgagccacgcggcacgtcggacgcgaaacgcgtggtttgccgcgtttcaccccttgccctctctttcaagagacttgattcaccgcatccatcccgtgtctctgctgctccgatcatctatctcgtcggatcaaatcagacctcccgtgccatcaaacatcactgcactcatcgcgctgccattgaacaaaatgtcaaagattgatgagatgatgcgaggccagcagattcgagtatatatatcgagtccagcttaggtcgtgaccctttctggacattccatcttgcatgagtgatcattcaaactgatcccgattgttaccatctcaacatcatgaattttcttgccctccgaaacccctcggcagtcttgtcggctcaactcatgcaccgtcagggtcttcatacctcgactaaagtcttcagccaaagacgtagggagcacgacagtctggtccggacgttgggatgtgagttgaaacatcatcgctttcgatcgtgtttgactgcgcttaaatgccatttatatacacattacagccggcttcaaagataaaatcatcgacattaggcagatggtagataacctcaagattctccaagcagagaggactctgaagaaccatcctgacagtgagttgtcacgcgcagcttcggagttcagaaccgatcctgagctcatcagagttgaaatggtccttcacaaaagaggccgcgttctaccggtgagagcctttcttttcgctgtatggggacgataagagcatggagtatttgtctgatcacacttgcggcattcttcatacagagacgcggtccgcgatctcacgcaggcgtttcccccctcgttgtatccgtcgagggaaatctcattggacaagattcaaactgtactttcggatgagaattctgtggcatggcgtctcgtcaccagtatggtcaccggcggacgagtcaaagaaatcgaatcactcagtgaggagatgagggctgcgatcctgttccatacggttcacggcatcggtacagtcaaggccaaagacctgtgagtgacgatgaggagtgtcaaagcgcatccgcttggaactgataatgctctttgctcagggctgctctgggacttcgaaccctggatgacttgaaagagaatataaacagattgaccgcgggtcaaagggtccgtacatatcgtcagagtacgaagtgcgtgtgagctgatgtttgcctacattccacacagctcggcctacaatactatgatgtgagtcggtggcttcaaatcactccgtatagatgacttcatgttgatagtccctcctttataggacatgcaaactctcatacccagggaagaaattgacgagttcaaacagctgttctctgaggcgctcaagatcgatcctgaaagtcagtcgtcccgtttcaccacaatggtcgatcgtttgctcatccgttgataaatgcttttggctggtacagtcaagtttgagatctgcggctcttatcgcaggggaaatggcttgtgttccgatatcgacatcgtcgcttggcacaagtgagtcacgcagttccgcaacagaggagaacgacgccgatctgatgcgctgggccagatcttacaacgaccgcaaggcggataagactaccacgactcctcttatggagctgatctgggtcgctcttcgaaatgcgggacttgcgcacgaggacaaatgtcttggcaagggtgagtgtagtcttgtccgactagacctgaagagggccgtgacccattcgacctcgaaattgaaatcctcgtaggccctaagaagatcatggctctcaccaaactgcccaaggatggcgccaaatggcgccaagtagacattcggttgtcgaccctagactcgcttccatacaccatgctggcgttgtctggagacgacactttgatgaagatcttgcgaaagacagcgaaggaccgattgtcagtccaggattgggcgggatcgccccgaacataggctgataaggtatcatctaatgatagcaatctgactctgaacgagtacgagatgggtcagaggaaggctgattctgtaagtgcaccgtggtctctggcaaagggcgacagcgctgaccttgttcgtggaattattctccgtacagctcacctccagtaagtcggtgcccggctcattcgtatattgcgtactctgaagcatggtttctgttttccgctctctttttagctcaagctatcgagggtacccaagtgctggtcaaggatgaaagggggatcttcgagcacgtgagtgaagcccgatgcagttcgacctgcttctgcgctaaacgagactgacttcgcccctattgatgcagctcgaggtgccttacctcgagccggagcaacgcaactaccgaacctaccagcacatcttgcctcgccactttttctgagttgacacagcgttgtccctgtgggggccgttctcgctcatagggattcttgccgtttccgtcttgtacatctcaggtgcctgcccttaaactcccctctcaaactcttggttggtgatatcgattcgtgtgtttagcgtttaactgcagtgaaaaggtaccgcaagccccaacaaatcaaggttccctcaactgagactcgaagtccgtgtcttggcgtgtaaagctccatattcggtacaggcatggtacaaacggggtccaacctgagtctgtgcacccggatcgactcgcaatcggttcgccatacgtaaggtgttgtccgtggtcattatatagccagagatggccggaacgaagaagagggctaggtctgtcggaacatcatcgtccgacctcgtgttccgcgaggagctgtccgggataggcgatgggtgtcagagtacccgggatttggatgaggattcaagatcgcactgaccatgttcgggataccggtagagattgggtaaacatggccgcaaccgcggcacttcatttgaccttcctcgacgtgaacctgacgataccaaacgaaatgaagcttcggtcagcgtgccttctctagatcgatctcacaaaagttacgagactcacctccatcaatacgtgatgcaattttgtcaaaaactcctcgctctccaaagtctccttgtcctcgggcatcttttccggtagactgtcctcgcctatgctcctcgctgtctgtacgagcgcctcccattcgagcttgggaatgaatcgtttgataaagtcgaggttagcctcagcaggtcggacctctagctcgacgttctcgaacacgagagggtagttatccttggtgcagttctctgtttcagagagcagggcaggtgagcttcgacgccatctagatgccttgcaacgagacccccatccatgacgtactgacgtggcaagccagcatgttgtgggtgatcaagcgaaccattatggcaatttcctgtgctatctgacttgtgtcttgtagccggggttgtctgtgtctatatgtcttgaccgactcgaccactttgtcaaattcgaatgatgttcctcacatggctttcgaaatcttgaggggagacctatcgcctcgggcgcgtccagccgttgaactgccggtcaacgtcaagtctcacctccgacaagatatcgcgaccaagctagtgaacaagggaatgctcgatacacgaacacgcaaacaagctccgaaaccagcatggaatgtcgacaaatgctccttgccgtagacaggatctaggacccacgctacacgggaacttctggcaacgtcttgctatagaggatacgaccgagcaagtcgggaacggacagcaagctacagtcgactgaacgcggccagtccttgtggtttctgtttccgaactcaatcacatcagttctcggtaaagaaacgatcgcgacgagccccacgtaccgaaagacgagacacgaagagctagctcctgtgctacatccaatcaatcgattcggcaggaccgtagatcggtctttcgctagaccctctgtctgacgatcgccaacacgaaggttacgctctggcaactttagaccaagggaacaaacaaaaagcacgacagcttcacgacctctcccgctcccgcctcactttgagatatcagcacacctactcggcctcgccaattagccttcaaatgtctcatccatacgtcaaggatacccaaatctgggtccctattggaccttcggactgggtaaaaggagagatcatctggctcgaccagcccgcgagtgcagacgccgagacctacgtgaccctgaagatccgctatggctccgaccagaccgagttggagtactcctaccctcttggggtcctcactgctgcaggacaatctcagttctccgcagtgagcccgacaagctcgaccgggacgagcgtagggactcccttgccagggaaagacgcagatggaaaaccggtgcctctgcctcccttgagaaaccctgatgagctcgagagatcagaggatctggcagatctaagcaatttgaacgaacccagtggtacgcctcgctctgttccgtctgttcgtttcgtcttggtcaactcgctcacccgcaatgctgtatcgcgtctttctgatagtattgcacgcactgaaagaacggtatcagcttagagacccctatacgtattctggaattgtgctggtgagtctggccgttcccgtgtgacgtctgtggaatacgttctgacaatgtcgtgctcgtgcttgtataggtcgccttgaaccctttcacacctctgaatatttgtgagctagctcgtcgtggtgaagcgacatgaacgaacagcgaactaacgtagatccatctcgacccgtcagatggaccggacatgatcaaatcatattctgggcggaagaaaggtgacctgagcccgcatgtgtgagttctgccgtgggaccggatgaagtccgcccgacagaatagttaagttttgcttgatatcgtgtccgaatcagattcgccattgccgaggatgctttagaatgcatgcgacgaggtgcgggaggtggtggagctgatgccaccggggcgggagatcagaccatcgtcgtcagcggtgaatcgtgagtttcgatcgcagtgtggtctcgtcgaagggcggtagctgagtggtattttcggattaccgcagcggtgctggaaagacggtatcggccaaatatatcctgcggtactttgcatctgtcgacgaccccacaagggatagctcggcagcgcgacgacaacgagggcgagccggagtcgcagatgaaggtggaatgagcgagaccgaacgtcaaatcctggccagcaacccgatcatggaggcattcggaaacgccaagactactcgaaacgacaatagttcgcgattcggaaagtatatcgaggtgagtcgttcaagctagctcggtgtttccgattgccgaactgatctcggtcttccgcatctgtaggtcttgttcgacaaggaacacgatattgttggagctcgggttcgaacttaccttttggaacggtcccgtcttgtgtaccaaccggaagtcgagaggaactaccacatcttctaccagcttcttgctggagcacccgaaaaggagcggaaggacctgggactcgacagggcgacggcagatttcgcttatcttgtgggaggtggacctacggctacccctatacagggagtcgacgatgccaaagaattcgaattgacgcaaaaggccctcagcacggtcggaatctccgtcgagaggcagtggcagattttcaggatgctggccgcacttctccatctcggaaatgttcagatcaaggcggtcaggaacgaagcggggatcgactcggatgatgctgcgctcggactcgcgacgaccttgttgggagtcgacaaggaagagttccgcaaatggaccatgaagaagcagcttatcacgagaagtgaaaaaatcgtgaccagtctaaatgccgctcaggcttcggttgtcagggattcggtcgccaagtttgtttacagctgtcttttcgacgtgagtacggctgaccaggccaattgcagtattcaagctgacaacctgactcttcccctctagtggttggtgtctatcatcaatgagagcttatcaggaggtggggccgctgacaaggctatcaaattcatcggtgttttggatatcgtaagtgccctcattgcggtcactctgggttgcagcgctcatagcccctctcatacgtttagtatggattcgagcatttcaagaaggtaggtattcaagccgattccgaataaatcgatattgggctgatgccctgttacgtagaattctttcgaacaattttgcatcaactgggccaacgagaaggtgaatatgagctgatactagccgagtgaagaaatgatttactaacgagatcctgcttcgatgtctagctgcaacaagaggtaagcttcctcgagcgttggcggacgttgtttcatttactgacacgaaagccggcataattgtctagtttaatgctcatgtcttcaaggtgagtcaaactcttataagacacggttgactaggcgctaaatgctatggttgcaaatagctggaacaagaagaatacgttcgagaagaaatcaactggactttcatcgaattcgcggacaaccagatgtgcatcgacgtcatcgagggcaagatgggtatcctgacgctccttgatgaagagtcacgtttgcccgcgggagccgatcaatcctttgctggcaagctgttccagcagattaacaagcctgagcaaaaggaggtcttcaagaagcctcgcttcaaccaaaacgcattcactattgcccattacgctcacgacgtgacatacgacgtcgacggctttatcgagaagaatcgagacaccgtccctgacgaacatttggccttgctgcaaaactcgtcgaaccctctcttgaaggattgtcttgaagcagctcttgcggctgcgaccgcggcgaaagagaacaatgcagcgcccgtgtccaagacccctgctgttggtcctcctaaacgagctggaggtgcagcctcggcgaggaagcccacgcttgggtccatcttcaagcactcgctcacgagcctcatggataccatcaacaacaccaacgttcactacatccgatgcattaagcccaacgaagcgaagaacgcttgggagtttgactctgagcaggtattatctcagcttcgagcttgcggtgttttagagaccatcaagataagttgtgccggataccccaaccgatggacctttgaagaatttgccgagaggtcagtccaatctcaagtcttttctggtgtggtccactgactatctaggttctcagatacgaaatcttcattccgccaagcgattggcaaaagtttcagggatcggacgaccttcgaccaatttgctctgccatcctcgagaagagtattgcggatcaggaaaagtatcaaatcggtcttaccaagatcttcttcagacctggcatggtcagtgtgctcgaccgcatgaagaagcaacgcctggatgctatagccgtcaccgtgcagaagaattaccgtcgctacattgcgcggaagcactaccaggcattacgcgaagccactattcgcatccaggcattggctcgggggcaaattgcaaggaggcttgccagtgaaatgcgaagggaaagggctgccatcgcaatacaatccttcggtaggatgtatgttgctcggagagcattccacgagactcgacaggccgtcgtcaagatccaggctggttagtagacccgcaaagttttttgcccctcgaatctgggctaacttttcctcactgtagccatccggggtcgacaggcacgcgttgcttatcaggacactatccgggagaatgcagctacgactttgcagagcttatttaggggattgtgagtctgcggcgcgcctgtctcatgggcttaactgatcgcttcttgacgacaaacagggtcgcaagaaaacgagcccagtcagatgtacgcaaggtcgtcttgcttcaagctttgcatcggcgtcgtctcgccaagaaggaattggtcacgctcaagactgaagcgaaatcggcaacgaagttcaaagaaatttcatacaagctggagaacaaggtcgtcgagctcacacaaacgcttcaaaaaaggacggccgaacggaaagagtttcaggaacgcgtctcgaccttggagagtcagatacagcagtggtctcttaaacagaccgatgccgacgcccgtatcaaggagctgacggccgagctcaaaaagcctacggtacctgctgctcaattcgaggagcttctcgccgccaagcagcaagtcgaccatcgtgtcgaggaagccttggcccatatcgccgagcaggacgccgagattgatcgactcaatgcggaagtagcggcgcagcacaaggtttcacaggagcgacagctcgccttggaagcggccgccagcaagaccttggaaaactcatcagcggcgaccggcatgcaagacgagatcaacgcgctcaaagagcagatcaaccgagccaacgctctttcagccctgacgcgcaacacccgagtaccgcaacctccatcaccgaccgtcacgcatctcaacggttcgaatggcgcttatcgtggtatggacccgctgcctaacttgccttctacgggacgtactcctcgccgacacagtatgacgggtgtcctacacgatggtgacggtcaccgcacctcggcagacgagcgactcttgggcagcaaacgggacgcgtcacaagcgcgagccatttctatggcattccctcgtgacgggcctcccaacgggagggattcgcaagggctgccagtctcctttgagaaccctgatgaagagatcatgcgcatgctcgaagacgaagccgctctcgagcgggacgtgctgcaagggctcatcatggacctgaagatcttggccccgagtttgaacaacccgcccaaattcaacgaagtgatgttccctgccaatctcgtcagcctgatcgtcaacgagatgtggaagtatggcttgatcaaggagagcgagaggttcttggctaacgttatgcagcacattcagaaattcgtcatggttcgtccacggtctggatcgacccgctgcttctactcgctgtaactgacactggtgcttgctattatcgcagagtttcgaaggcgaggctatcatcattcccggtttcttctggttgtcgaacatccatcagctgctctccttcgtctgcttggcccagagcgacatgcaggaaggtgtcggtcctggtgccgaaggtctaggccgctcgttcgaatggtcagactatgaaaagctagtctctgtcgccaagaacgatctcgacagtctcgagtacaatatctaccacacgacggtgaccgagatcaagaagcatctgagcaagatggtcgtgcctgctctgatcgagaaccaagccctgcctggattcgttaccacagaagcatctggacgtttgttagggcgactcatcggccagaccgaaaaggcaccatcctacacgatggacgacgtgattaaccttttgaacaaagtgcacaaggccatgaagagctaccacttggaagagggcgtcataggccaagtgttcatcaatgagctcgtcaagctactcggggtcaacagtttcaacgacatgctcatgcgacgaaacttcgcttcatggaagcggggtgagtttttaagtcgaccggttggtaattgggagctgccgagctgacatcgtatttgcgcgtctccagcgatgcaaattcagtacaacattactcgcttggaggaatggtgcaagtcgaacgacttgggcgaaggtaccttgtcgatggagagtcttatgcaggccaccaagctcttgcaactgaagaaggttggtccctgcttcaaatttcgattgaccgatccgaagcttattgcgactcgacttgaacgctaggcgactcctgccgacattgacattctctttgatgtctgctggatcttgtcgcccacgcagatccaaaagctgatcagtcaataccatgttgctgaatacgaggtgagagtgaacgttcagcatatcgccgttttcgaggtttggtctgattcgctttgcccttgccagacgcccatcgcgcccgagatcctaaagattgtgtcttcgcgaatcaactcgaacgacaaaggcgatcatttgcttctcccgcccgagtctgaagaggccatgccgtaggtttcggcttgcattgccgatccgatcggcgcctactgaccgtcgtcgcgatcccgtcgctttagcttccaactgcctgctgtccgagaaatcgctgatatagagacttgtgagtcgatagccgtggcgacagatctcgtcctttgactcttatgccgatcgtgatgtatgttcacagatgtccccgcctatctggccgtaccgcacgtacgccgactggccatgtttgctgtgagtgtgcaattgtctctctctgtcttctatcacgacgaaccgaagttgaacgaacgtctcccctccaggcttgagaaacgaattatttgggacgataccacaatgccatccgccgtcaactgaatgactttgattttttaacgccccttacatgagacgtgcccgcatgacccgcacgggcagaactatgtatccatacatttattattgatcatttgcaaggacgcaatacaatcggaaagcgcgactagaatgtagaccgggggactagggaacgaagcagtgcaccgcatgtagagttcaagagtgtgcaacaagagcaagttcgagcgaaagcgaataccgatacaaggcaaattcgaaaagggcagaaaaggggcttgttttacaaagcacaagtgcaggacctgaagggcacgccgttttcctttcccgaatcaagcatgttgctgagcaaacttggtcaactcgttgagcttgtcggtagcgtattcctttgcccggatgatttgttccaagtggaacgtgatctcgagctgaatcttttccctcgttgcgttgcctcgatgaatcatctcttgtcgcctgcattcaaaggcgtcgtggttagcatgcgacacgcgtgggagcgccagggcgactcgacgggactgactcgaaattaagttgttgaatctcggcctgaacggcgagcaattcctgatcgctcgacatggacatggcccctacgtcggcttcgagctttgccacgcgttgccgagtgtcctgcgtctgagcgttgagtttctatggcggcggacgggaacgggccacacttgcatcagcacgagcgatccggacctcgacctggacatcgattcgacgtacctgcttttcggcctcggcggcgctctcgagactggccaacttgtgctcgagcgtctgaacgtgatgccgtctctgctcgagttcggagttcaacctatcgagcttgtcgtcccactcgatcttttgattcgactgctgcctccattccgttctcaactgttccccaaacgcctgtaacccgggccttatggattccttgatccgttgaccgacaacgttgaccgcggtgaggtctgacgaggccatgttgacgtcgacgttgaaatcgatatcgtactgttgctgtaccgagctcgcgttcagaccgatgacggccttgccatgggtatacttgttgacgagcgagtcgatatcgtccatccggcgggtgacggcgatctcttgttcgcccagctcgcgcgtctttttgtgcaactcggcggtgagctcccggatggattcgctcagggtggaccgttcgctgttcatcctggccacctcgtccggggtgaggttttgttccgctacctgtcgctcgagctcagtcttgtcctgttcgagctgttgaatctcggcctctgcgtgcgagcgaaaacaagacgaaacaaaaaaggtaggtcgtgactcgatcagtcgtccgtcggcggtaacggccttggccgtagctcggggacagacttaccgacattgacgagagcctgtcgaccctgttcgatcgcctgttgatgtttcctcgccttttccctgtacaactcgaggtacttgagttggtcctgtttatgcttgagcaggttgatttccttgttctttgcctcggtcagggggttctacgcaagaaaaggaggagggggagagagagacgcgcgccgatgagagtgaggtcagacacgggtggtgcttggcgtctggccagggtcgacgtaccggctcgtgcctcatcagattcaactgcttgtccgcctgttccttttgctcgctcaactctctcaagctcgtgatatcggccgcctcgatggcctctacaaagcgagtggacgaccagaggtttgatcagcgcgacgcacgacggacgacctggcgcacgggctggggcaagggtgaactcaccaaacctctctgtcaacatcctcttgggtccgtcaaacgagacgtcccctgcctcgtcatcctgtgcccaccaggccgcgtacgcttccgtgaaatactctttttcgagacgagagacgacgtccccgttctcttcctgtaattcctgcatcgagagcgtcgacaacggtctcacccaggggtccgtcgacgtgtgcgggttggaccattgacgcaaggcgcgtgagagttcggcgagccagacgagcatgacgaggatggtcggccaattcgtcggactgcccggagcgcccagtgccgtcttgcctacatcggtagggtaccgcaagtctttgaggacttgaacgcattcggcttcgaaccccttggcgccgacttcgagggattgggcgtaccctgcagaataaccgagcgcgtcgggagaggtgacgagccatttaaagatgctctggaattccttggtcgtaggcgagatcaacgtcttgctggtcaacggcaagttgcaccgggaggaatggaggtactcggatagctgatcccgacattgtttctgaaacgtcgggttacggatctgacgtgggtcgatcagggcggacgaggaagagccgccagggttggaagtgctcgatccggggttgtaggcgagcggggctagggattgtcggccagccgaggcgaacgaggaggatcgacgggcggtggcactggcactgcaggcgaggccggggggcacggcacggccgaatggacgtgagcgacgggcaccgggggcgtcgagattcgagaccctacgagcccgactcacctcatgatggattgacgacccccaggggtcctcccatagatccccgcatctcctcttccaccgctagccatcagacccgtcggctgaccatgaccctgttgactacctccgagtccgggcaacatggtgctccgcctgttcgcttgtcccgggccgtccatcatcggttgttgaggtgcaccgaggttcatcccgggtgccacgctcatcctcccactaacaccaggtccaccaggtccactaccagagaggacgctcgccctgaggttctgattggaaccggacgaacggagcgcgcctccttgtggtttcgaggtcgaggtgggtaatcgactggtaggtccgttcatgttgatgatgttgtgatcctgtgccaaggtacgtcgtcgtgtgtccatccggggcggcggggtgaatggggtggtggcagcgacgatgacgaggaagagtgtgtttgtcgagcgtgtgtgtgtgtgtgtgtgtgtgtttgtgagtctagttgggttcagagagagagatgtatcgcacgtatcgactggcaagtgattgttgttgacgatttcatggacagtaactaggtcgtttcgaggttgttcgaggtttggttgtttacactttggaaagagaagagagacgcggggcaagggtgagagtgagggaggggcgacgcgcgagacagacaataacgtaattatatcacgagatggtaagtcaatgccgtcatcccttctactgtcagctctggctgcaccgcggatacttccatcccggtctctcttcgaccgcgcgcgcgtttgaccgaattcgacaaaagttccaaacttgcaacgacctccgagagacaagaaagacatcatcaaccactacgtccactagccactatcatcaccaccaccacctactcccacccaccaaccaactcttaccaaaatgtccgactctaccaaggtcgaagacaagcccaagctcgacgatatcaccatggaagacgcatccaccaccaccaccacccccgtcgacgcatcgaaacccacctcgtcgtccaccctctccgccctggaagagtttgctccccagaaagacgctcagggggaatggatcatcaagcaactccccgatgtcttgaaagacaagtcggagcaagaggtcgccgaggtcaagaagaacattgtcgagcaaggcgagtctcagtcgttgacgaccgtcatatcacctcttcatcccgctccctagagctaacccgaccccatcctctcgtcctcctcgcctcgcctcgtctcacgcagtcgaattctacttttccgatagcaacttcccctacgacaagttcctctacaccctctccctccggaaccccgagggtttcgtcgacctatccgtcctcctctcctttaaacgcatgaagaccacctacacccagatttacgggcaagagttcatcacggcgtgtatgcgggaaagagaggtcgcccagggtagtgagggacgaggagatagtttgtgcgtcttggcagaagatgggaaacagatcaggaggaggaaagggttggtcaaggattctacggcgtgggatcggaccgtctatgtcgtgagtactagtccgttcgtcacgtcacgtcacgtccggggcgtcgagtcgaagccgggtcgagctgagctgatgaacgatccatgcacccccttgacgtcacgtcgcctcgggtagaaaggattcgggacgggcgagaccgagcataattctcaggaacagctcgaagcttggttcaaaccgttcggaaagatcaacgcgctgcgtatgcgtagggaagaccctaggaagcagagacaacagcaacagcagcaacagcagaagaagggcgagcctgtcacctctgccgccgccgctgaggggtcagaggagaagcctgccacgtcgaccgccgccgccaccgcggggggttcgagggaaggtggtccccgattgggtgaattcaaggggagcgtctttgtcgagttcaaagacctcgaagaggccaagaaattcgtcggtctggacaacaagcccgagtttcagggtcaagaggtcgtcgtcatgttcaagtgagtcactcgaggtcgtcccggccgagtttttttccccagcaagcgtttggctgatcttgtcgtgtgcctcggttcgaacttcggtagggaggaatacgtcacgatgaaggccaaggaaaagggaatcgacccgtcgaccattcaacgtaacacgggcgccggcggtggtcagaccccaaagaacaagtttaacgcgtttcacttgaagaacggtggggttcctcagggcagggaaaagaggaagcgggatgacgaggacgagggcgagaatggggatgggaaaaaggagaaaaaggcaagtttcgagtcgacgacgacgacgatgatgcgctgccgcacgtttcaatgctgatcctcgatttggcgctcggtctgcagcccgtcttcctctacatcgaatacctcggcaagaaactcgccgtcgatcgtgctgcgggtacgttggccgacgccgacgaactcgactacccccgtcagaccgtgctcaagtttagcaacctgcccgaggacggcgattggaaggaactcaagacgggactcaccgagggcgggttcgccgatactttcatgagctaccccaagggcgcgccggcgggaagcttgtgcatgaagagcaacgaacccatcaaggacgacgaggtcgacaagatcaaggggctcaagttggagctcgggggcaagacgatcgattggcgacgggcgacgggtgagtgcccggtgtgcgtgtctatatgttgatcagacgaggagaactgaccgatcgagcttttgtgcgacctcgcaatcagacgacgaggaaaaggccttttggttgacccgggccaacttccaggccagccaggccgtccgcaaggccgacgccgaggacgccgaaaaggccgaacgtaaccaagaggccatgaaggatggaaagcggggaggcggcgggggacggggacgaggcggtcgcggtcgaggaggtggtcgcggtcggggaggtcgaggtcggggcggacggggcggcaagagggattgatcggagaggtcgagtcgctcgatcgacggccctcgacgtgggggtgcgtcgtttgtccgagtagactcctcgacgtgtagtatgacagcggtcttggtatatggatttcttgacaaaaggtctacatgcgtgtcgcctcgctgtccacgccgatgtgagcagtgtaccaccgaacgccatcgtccgagatcgagtaacttccgctctgtgtatatgttgtcaccgggaatcgatcgatatagagccaatacctcgaatgtctgccgatggaccggcgaatcttgggaacatcacgacaagatccaagtccctacagcgcatcagctagcctgggaacatgatgatcgtgtcaaatgccagagatgtaacgagccagcgagcgatggttgacggaaattctcgtagcaggtcactgatcaacgtgtatgcaagtactggcgtttgaaaaaagtgcgtgcttccgattggaggaacacaaacaggctggtttagcaaaccgcttgttgcgttcggtagcccccattgtatgggacacagcggtggattactggtcttttggcataatggcgcttgaaaatttttgccttgactatgccagaagtaaatccaggggtgtcaaggtggttgcagaagtcaaggagtccacgaggaaaggcccagacgaagccctcaaggcactcaatcggttttgaaagatccacgtatgagtttgtttgctttgcgctttgggtcatcgatactacttcgatatgaggagacatttacaacatctggtcatacgattccgattaaatttcaaataaaggggtgggagggatgtgggggggggggaagcacagctcaaatcaacaagatgaggactttttccgaggattctggaagagacaaggagaaaataggatccctagcaatttcaatcactactcatacacctgcaaagaaaagtcaaaggagcgtcacaaagaggcatcagaatagaccaagagacatgtatacgattcctttgagacctttccttaacgtacccattgccacgattcatcagatctcacacctacctatctcaacttatgcagcactgtgtcgcccactcatcattgagtgtcaaggaccttcaaagacgtggcgtacttctagctcacgtcgagcggattgaatttgacaagctcagcccacagggctttttgatatgtaaaagtctttgaaacgtcataagaggttatccatgcttatcaagtcagccagcggacaacgactcaatgctgtaccctgatggcatagctaaatgacgcagcgtttccgcaagtatattcgtcgtgcgcttgctagctcccgtagtcatgtgtgccgtgggcgacggtcagtgacggacaggtagtctggtttacaaacagctgcagagtgcaaccgcttgcgccgtgacgtaggacgcctctattctgcttgagggtgtaccacaggatccgtttcagagacccttccacgaaagtaaatcggggaagtgcatcggaggcgaacctatatcaaacccgaagccatcagctaatactctgtgggcgcaggaaggccgcaagccatccagtgacacacccgtcaacgaagcgcaaaagaacgagacagcaggtagttcaagaggagaggagagttagcgtcagcaggtcgtcttgtgctgacctccgagaagcttctttccgtacagttcagcaaatcgctaacattgccgaacgagcagtaagagtaccgatccaaagcgcattcccgttccgtgtgcccgtcgatgaagcgttaaatgtcggatcatcccggagttaagccctacaaattgtgagtctcatcggggaattatcttgcctgacctcgtgtcagcacagcttctcttgctttcgtagctgaattagggggtccgccaagatcctcacctgcgtttgtcgataccatattacaccctagctctcctgcactcgaaagccaattatatttcttctgaccggcgctttttgaagtgttcccgtcaccttctgcacactggcctcatctttgcgctgatgaacgaccctctcggtctcgactcggtgacggagcgctcattgcacctctgggtgctagagagggggcggcagctaggcaaggacaaggtgcatgttggtcgtcgtacgaatcagcctccatgtatcgcaagagacacttaatcgtatggccaccgcaacactatgttgttctagttcaagcccttgatgacattgagactcaaactcctccccgggacacaagctggaccaaccttgtgctaccaattgctagaatcccgtcttatggtcgtactaccacatcttctaccgccccagttgtcgatgccaacaaggcccccgcaagtcaagcttctcgagatgagacaccaagcatacgacatgagcagcgagagctacaggctcgcagaggaggcgtcttggctcaagagggaagcgttcaggctcgagctcagtatagacgacgacgacaatttcggttactgcttataaggttcttttccatctacgcgcgcacacgttaactttgcgtcttcttgcaaatcggctggtaagcgggtggcttcctggtggggcttgggtgacacttgggcgacactttggcgacacttggacgacatttgggcgacgagcaacaaccctgctgtaccgtcttggtatccgaaagctgctgttaaacttttgaccgcgcagtctggtaccgctggggccacgacattccgttcgtttagatcgtttaggccgtccagctcctgtcagtttgtccgtgcatgtcgagcaagtcgtgccaataataatggttcgtagagaagcgtctgcgtcgagtcggtacgtggatactgcctattccaattgtagcgattttctcatgtacaccttggctattcgtcataaagtcagcggagaattgtacgaccttgacctattatcaaagatttcatttctttcgagatgccgccactacgagaaacgaaagctgtttacacgactaatgatcgcccaaaaaacacacgtataaacatttcacaacgtccgtgagacagacccagacgagaacgagacgcccccgccttcagtccgtagcatcgatcgcgacgcaaaagggcgtctgacttttcgaccgcatgatctcgacccgatcagaatccaaagatcatggctccgccgacaccgacgagaccgacgacgccggcgacgatcttgcctcccaaaccccagatctcgaccgcctgagctccgttagccggggcgctcgagctggcggcggggacctgggtgttgccggttcccgaagccctgctcgtggcggatccgacggcagccgagatctgggacgagactgacgaggcgatcgaggagacggcaccctgggaagaggcagcaccggtggtcgcggcggcagcgctgctgctcatcatcatcgagctggacatgatgctgctcatctgtaaaggaaaccgcatgaatccacagagttagcgaggagcgtcagaatcgacatcatgctgatgtgaagactcacgaccgaggccgagagagaggacgcggcggcgccggtgggaagggcgacgctcgaagtctggctcaagatcgagctagcgacgagggacgagacgccggagacgacgcctatcgatagcacaaggaaggaacgttagtctacccagaagccgcccagctgacacagaatcataaaaactgaccgttagggcaaagggcagcctgcaaactcaaggcctgtgcttgctcttccggggtacagttggacacgatacaggcctgagcggagtctaaaaggacggccttgttagcgtctagacgtgaaatgatgagccgaaacgtagcttactttggaaggcgacgttggtgcagacacaagtagggtcggcgctgtttcgtgaccatcatcatcgagatcgaggtcgatacgcgattgatcaatatgatgattgatcaaaatgatcgagtttccccgaaggaggtgcgccgcggacaatacggtcaaagggaggggaggagcaaaaggtggatcatcgtgggtcagcaaaacttcaaatccttttccagctctccacctcgccttgctgatcgacttctcgcgaacgaggaaaagacgaattgacggcgagcggcgaggagggtgacaagggagaggaatggaagttgacgtacaagctggcacaaccggcagcggtagcagcttgctgagaacaagtcaagacgcaggcagcagggctttgaagatgggacacattgacatggggggttagcgaatatacgtgcgggtacctcgttgcgggcaactcacgtctgggcgttggcaccgatagcgaccgaggcaaggatagcgagggtggtgaacttcatcttgtctagtgagatgtatgtatgtgttttgtttctgtgcgtgattgctagggtgaagaaggtaggttggaggtattgttgacagactaagtgatggtaggattatggggtaccggttgaacaggttccacttgttatatatcggcggctctgatggttggtatccggtaatctcgactcgaccaagtagtgcagttagaaggtccggggcgggtgcagcatgaccacgagccaacgggaaatcagaacccgctctcgcgcacatccccacctcaacccccagcctgctgccccgcgggggacactgccaatgtggggaaaaggaagtcaaccgacatctacttccgtcgccgactataggtcgctcgccactcgcgcacgctgacggtcccgcggctgacaagccacacactactactctttattcatggttcgtacctttgtgcgaaaccgcatattcccgctagtcaccttgcctgaaggagattctcgggagctgatcgaccgttcactcttctggttgtggcaagtcccggtctcgccaaatacggcaatgacagctgcacccgacgcttcgaccggtaatgaaccagatagcttccatatgcggtttaccgggaattaaccaaattgaacggcactcggtggtcttgtgatcgtggatccaggggagttcaatcaccgccagtggttgtgattgttgtgacctccactcgagaaatctgtctagtaatgcggcacctgtggaggcttcctggctagagctgttccagcaagaccaggtgaacaacaagacaacatgcacatcgtagtcacacctcgccgaaagtcatcgactcgtcgacctgacgacttcgagtcgttcatcggcgtctccctcttctctcctcctcggcaccctcgaccacccctttccaccacccgctcacgatggactcttcttcttcgtcctgtgccgtccgggtcctaccggtactgaccagcgccgaagatggggaggagattgaggacaccggctcgaacccaatccttatctgccctctgtccagcgagtcatcctcgacgttgtgggtcgcaccatcactggatgcgtcgggaaccataggtttgaagatttggtcttgcaagtcgggcagggtcttttgcgtccaactgcgcatcttggcggtgaactcgtccatctgctctcgcaaagcaggcatgaacgtgacgcgtttgtgggcgcagtcgaaaagatcagcctagggtttcgaacagacctctcatagctactcacgtcgcccactcccaatccctttccgatccccacgacgatgacgcccgcacctccaagcaccaaggccgtggcgatggagaatgccttgagggcaaaccagggtgagatctcttccccctctcccgtttcgcccatctccgattcacccaggttgtcatgcaggtccgagtttgggtcgagtgagaacccatgagcgtcttcttcgtctgaatatggatcggccggggtgagggaaaagtaggtgatggtcggagcgaccggttcgacatcggtaggtgatgtcgtcatgtccgagggtgctttcagcgtcgatggtgattgtaggctcgatacagtagcagctactggcaatacgcttagaccactcaagacgcccgccgtctccttcgatctcgcctgctcgcccgttactagcgtgatcggggttcctcctgcgacgtttcgacccttcgtcgaatcagtcgcaagaggtgcatctcgctccagtccacccaaaagtccatccagcggaccgggctgtcttggaatctttgtcgagttcgtcttggatgccgatgaactcctctggccgttcgatgacgaggcgatggtgctcgaagcaggtcctagtagtccgtccagtggccctcgccgtgatttgacactcgacggagtccgttcgtccagccggatggcggggttcgagagggccccggaagacgacaaagaaggtccagctccgacgtgcatgtccacccctgatagacgctgaacgactccctccgatttccctgctaccggtccggcattccgctcgagacccagacccgaggccgagttcaacccgactcccttgttcttcctcgagacggcatccaaagcctgtccagcttgacgtgcggatgctctcagacgatttcgtttgaatgcggggatgagggcgatcgtgagtccggtggtgaatgctagctgtgttcgtgcaaagtggcattccagagcgtttagcattgggggattggtcggacccggtcgtgtacgagttgggaacgatgaagcatgaccagaggcagaaaaataaatgcagattgatcattccgggtaagtaatcaaaatgcgatgatgtcatgaagccaagtttgagccgctcacagcggacaaggtaccgataaagactttacggctgacgataggttcctcttcctggtgacccgtcccggccctttctgccctcggttcggacatgtactcgacgtatatcttatttagtgaataagcggatgagaagagaagccgagttcggggctgagcatgagagatcgcctagcccccactgaccgttggcccacttcagacttttgcgaagatgtcgacctgctcaacttcgagtgctgctcgctacagatgtgagactcgacggttaccgtgatcgtgacccccatgacaatcacgtgagattctgacttgtgacaaagtaaacagccgaccccgggcctccatgatatgctaaataatgcagaacctcaggtgccggttctagtcactgccagctggtacatgtgattgattggccggtctgttacttttagggtgtgtcttgcgcttggtccatgtcgtcttcgccaatcgctagcgacacggactggggatcgcccccgaccggacttgcgatggatgacggcatcgtctcggttgcgttgtctttcgatggatcatgatcctgaaacgtgatcaattaccggaaatcaaggggaggcaagacgaccaagccatggctatgggttcctgaacatccggtattatattatactgtttgacaatcgacttgcgacttgcgacttgaagataggggcatattccatcaactcaatagggcgggatgggtgggcgcctcggtagcattttcttgcactttgtaaacaaaaacaaaaaacaaaacaaacgatcccgatcacgacaaccatatacttgccatccatccagagtcgagtatgagaacctgctgcggtccccccgtccccaataataccacatcatttgcggtctgtttgacaggcttgttgttccttcaagcctcacactctttcgaaatatacctatcgatacccgcgtcacaacaatcctgaccaaccggttggcaactcgtcatccctagccataatcggagcaagaacagcaaagtccactactgactacataacacatatatcacctcgagatggctcccaaccgcaaaccacctccgcgactcacatcgcctcccccacagcccatgagccgcaagccgtccctccatacgggacacgatgaacaaggtcgtcccgtcgcctggggagcgagtcgagcaaggacgacgaacgggctgtcctcggtttatcaggcctttgagtacgagcaacaaggtctacacgggaacgagaaccacgcagacacacagggagaagaagcggtaggccttctgcagcccacgccaaggagagagggggagggcgaagcgttgagcaatttcgaggcggccgtacaggccctgagatccagtgccggtgcggggagatcagggacgagttcggtcggatcggtctccacctctgggacgagtgcaagtgaagcctcgagtgctccgtcaaggcgttcagtacagtcgaatgcgccacattatgtcaagcggtcttaccaccaagctcaacctctggacatcggaccaacacagccacttaaccttgggggtgccgctactcactaccccgctcccgtcgatccaaactatccgacgacaattcagtttcacaaatccgcgggatacatcagcgttcccaccgtcaaacccgtgacgagaacgaatggatatcaagcactcaacgtcggttcgtctactgtcggcatcgggtctggtctaccagacctacccgtctatcgacccaatggtgccggtaacctcaaccaaagttctgctagcgacagaggtcttcctatgcccgtctcgatgatgggtaacaagaaccagacgggactagggatcggtctacatccctctcgggcagaggaggaggacggtccgacctctacggcgaggatggggaacgggaggaacgtctctgggcctctgaggcgaagaggaagacgtagtcgtagtccgaccccgtttgctgacgaagacgaggacgaagaggcgtcagcaaaggcccggacggatgacaaggagaatacgatcggtcgaccggatcctttcggttccatcgaggtggatctcgacaagaggagacggatgcaggaaaaggccgagctgacggcgatttatgatactgcggtcaaacgacaagcactgaaaaaggggtacgccatgtacgtcgacgtcgaagatggtacggccgttgggagcgaggcggaaacgatgctcggcgaaaaggatatgggagagttggagatgatggaggctgtcccgaggtatccgtattcacagacagacgaggaaaagagaaggagcgcggatctggcctcgtaccataccaaagaccccaggtcgtccgtatacgctccgttcgaccatgccggcgaaacggacgggttggacatcggggactacaagcacgccgatggacccaacgacctttcgtatcgcgacgacgggggcgagtatgaagacgacgaggacgaggacgagaaatctgaattccctccgtcttcgacggcacatttcgggcccgcaccccagggacgggtcatcaggcgtcatttgcagaaaaaggcgaaaaaggttgtcgagcttaccgaaggcaacttggtcatcgatctcaagatccccacaaagctcgaagggttcttgccggcagcgacgagggggaggatgggcgaagatggagacgaagttctgtacaccaggtgagacatctaccaaccggattggcgtgaacgatgccaggctgatcgaaactgcgacgttcagatactcggccgtaacttcgactccggacgatttcatcgccgaaaactttaccctccgtcagacacattatgagcgggagaccgagctcatgatcgtgatcaccatgtacaatgaggatgagatcttgttccttcgtacgttacatggggtcatgaggaacatcggacacctcgagggcagaaagaactcgggaacatggggtccaggtagctggaaaaaggtgagatggcgtaagagcggtggatggccgagtgcttttcgttgatcaacgaattccccaggtggtcgtatgtatcgtcgccgatggacggaaaaatatcagtccaagggtcctcgactgtctcgcctcgctaggggtctatcaagaaggtcagcagtacctcggccgtatcaaaacatcgtaacggggctgatcgtcgacatcttctacaggggccatgaagaactcggtccaggacaagccggttcaagcccatgtgttcgaatacacttgcaccatgggcttgacacccgacatgaaattcaagttcgctagcactgacaagggtatggtacccacgcagatcatcttctgtctcaaagagaagaacgccaagtaagcaagacggctgaacttgacttgggctttacgcatctaatatccgtgatttcgcttcattcaggaagatcaacagccaccgatggttcttcaacggattctgtcggtcactcgaggtacgtcccagcgcacatgtcgtcgcgcgcggctctcgatgctaagacttgccccgcgatctcgcagcctaaagtgtgcatcttgctcgatgtgggaactcgccctggacccaaatcgctgtatcacctttggaaggcgtttgaccagaactctcaagtgggaggggcttgcggtgaagtcgcagtctacaagggccgcgcttggaagagtcttcttaatccgctaggtaagtcctggagtcgactgtggaagggagacagagctgacatggtttgattttgtagtggcgtgtcagaactttgagtacaaggtaggcggacgcgcagtatctcgcagtgtccccacactgaaccgcccgtacggtttcaaagatctccaacgtcctggacaagaccacagagagcgtcttcgggtactgcgcggtgttaccgggagcgttctccgcgtacagggtatgtccagtcaactaaggatggagtcgcgagcgcgggattgatctgcgtgcacatatatagtggctggctttacagaatgacactaccggcaagggacccctggcgagctatttcaaaggagaggtgttacacggtcgtaacgccgacatgtttaccgcaaacatgtatctcgccgaggaccggtatgtctatccggcgatgctatttcttgatgccgtattgaccaatcggggttggccgtaaaaagtattctatgttgggagatcgtgtaagtaaagccggtcgagcctctacgaacactagcccgagcaccagctcacatcgacgaccacgctcgacagagccaagcccaagcataactacgtgttgaaatacgtcagcgctgcggtgggtgaaacggacgcgcccgaggccatcccggaatttatcagtcagcgccgtcggtcagtacagcgatcgagatcggcagggagggatatcattgttgacgtgcggattctccacaggtggctcaacggatccttctttgcggcagtcagtcgtaaagtagccaagtctcttgcttacacgatgctgatgcccttctgttccacttcaaggtgtatgccctcacgcatgttttcgatctgttcaagacggaacatagttttttgcgcaaaatggcactgttgttgcaggcgttctacaatgctatcatgattggcttctcctggttctcgttagccaatttttatatctttttcgtgagtgccgcttgacacagctggtcgatcgcgagcaataacctctctcactccctctctagatgattcttacgtccgcgctggaagacccggcattcggcataccgaagatctcgatcttgaatgctatcatgcagtacacatatctgggcacagtcatcgcttgcttcatcttcagtatgggtaacagaccacaagggtgagctcagcatttgtggccattcgtttcccaggctaacatgaagtcaatcagatccgtctggaaatacacctcggcagtgatcatcttcgcggtactgacactatacatgatcgctgcggccatcgtttgcatggtacaagccttcaagaatatccatgatcccatctttgcccagatgatcgtgtctgtggtgtcaacttacgccgtctttgtcatcgccagcatattggcgtttgaccctttccacctgttgacatctttcggccagtatatcctcttccaagcctgtaagcctgacgattctttgcgctaccggccgtggatattgatcgaacacgatgggcgcacagcgagcatcaacattttgaacgtttacggctttgccaataccgacgatgttagttggggcacaaaaggcgctgataccacccagaacgatctaggagcggtcaaaggtgtaggaaacgaagtcgaagtggagctcttggcggaccagcacgacgtcgatgctgcatacagcgaagcactcgataatctgagggtaaggaaacccacagctaccatcaaagtcaaatcgacctcggaagaggagcaggccaggaaagattactatgtaagttacccgcccatgccattcatttagtctgggatatagctgataattgcacccatcattgtcttaggcgaacgtcaggtaagccgtgaccataggtcaaacaggccgccacaaccgagccgctgctgattcttgtccctctcctgatacccaggaccaatgtcttgctcggctacgttctcagcaacgccctgttggcctcggtgatcctcggcggcagcagtaaattctcgacattctcggaatcctccagtcgcacatcggtctacatgctgtgcatattgatctttgtcgcggggaccaacttgttccgactgataggggctatcctttacttgctcatgggcctcgtcagtcgtcttcgtggcttcttttagattcacaatcggacactggacaatcgttcctataatatcgtcgttgtatctgcatgtccatccggtctccgaccggtttagagctggacgcaccacttagagtctctattacatagcaatgggtcattatggggttcgttaaaataaaacgtcaggcctccctatctttcgtctcatgcagcaaatcgagcttgctttgccggatctcttccagttccttcttggcctcgtttcgcaccccttgcttcgccggcggtaggtaccatgcctagtgacgtcaatctatcagccttgtcggcttccttgcttttgacagtgggttcgcttgtaggggcctgaccaatgatctctgggagagcattttgcattgttcgtaccgcccataatagggacatatctggaggtcgcttcgtttggctctttttggccttttctgctctcccagccggttgggcgggaagctgcccgtcttgaacggacccgtctggcggcgctgctgctggtacagtctcgacgggtaagccggccgaatcttcttgccctggcaattgaaccggagcggattgccagaacttgagctcccggatggaaggcaaaggtgcggcggattcgagcatttgcatcgacgtcgagatatgttccgtgacgttgagctgccgaatcattgcctggtcaggatggcgtcggatgtgtaatgctgaaggtccgctcaccagtctggtctgtatcagatcatacaccgtgttgcacttgaaaacctgaacgccgacaaaagcccacgtctccaagattgccattgtgcgctggtcgatttcctgtaagacccagtattgaggaggctggctacgttctaaagagaaatggtactgctttccgccctgcatcgatcggagggctctagacatattaatcagtatctggcgagaaatgggcgggccttttcgcttcacactcactgctttaaccggtcgtaggtgaacgtcggatcgtggctgaactgggtgaccaaattccaattatccgactcattatcgatctgacctagatggacaaagtacatccaactgcacgatgcgcttcagatccggtcctacattcggccaccggcgtccaccatcgactcacgcttgagcttccgtatggagaggttgtgacctgttcatctcgcgaatccagtccccatccgaaaagcacatgccttcagcggctggcacatagcgaatgtcgtctccccgagacatgactcgtgtctattacggtaacttgctaatgtttgccaactctaggcataactatcgacgcaagtgaaccggtcgaacgactaactagctagtctacaggacgtagatcgtagaattggaagttgaatgctggaccgagccgtcgtaccggaagcaattggttccgagatttcgctcataaccagcgctctgatccgggccaagccatcgatccttaccttaggcggcgcatgtctcgaaaggactccctacggatcggtcgcccaagatcagcctgtgatctgtaaaggagtattcttctggacagtctcattgagcttcaagttgctgatgagcagtagatcgtggcagacttgcaagagggcagtcatctggaccccgacagatcatccggatccttgtcttgcacaattgctttggaatctgctgcgatcatccgaattgtttcacgcaaacagacctccataagtggttcacttgaatctccgctcgacctgcagtcaaacgccgttcctctgcttgttgcgattatgcgattctcactcggttcgcgtgatcccccggactgggcgttccagcctggctctttctagatgtatttggaatcactttcaaccctggcccccgacgttactatcagcctcgtggtcacctctgtgtacctcgacaaattccaagcagacaagaccgagtcgtctccttgaaacgggcaaagtgttcgacaaattcgccacactggtcctcctttacgcgaatgagcttgatcgatccctcaatattttgcttgcggtatgaacaacaggaaaacgcgtcgatgaagcacctacatggcatcaaaatccttcggtattcgtcccacataccccgctgtcacaatctctctgctgcaggtgatcgtcccccctactttccgccaagacgggttgccacaccggcggtatactagagtccgcgtccatgaacatgtttgcagtggcacgtctccaatactagcgtgcgacgatatgtctgccggtgcagatcaatccgtcatgtcaccacaaatgcagcctcaagaccgtaccagattgcctgacaatcgatcacgcacagacggatctgtcggcccgtctaactggctcggagggattgaccatgtcacaacgtttcgtatttctcctgacagcatcatcaacatcctctttgctacggtacaatcgtctccaccatatgatctcgtttggcattcaacaggaaaaagtccaggacgacgcaggcgggagcgttcagcccgtcagactcgtttactgggtgagaccgacgacaccacaggcgcttcgggcaccactgtcaaagggaagataacgggacgatgaaaggagtcgaacgttagtcgaggttccccatggtaacaagattcctcctcgggagctgggggggacgtacgcgtttccggtcttcaagctctcctcgttgtcgcccttgccgaggtcgtcggtaccggcgtggatgacaacggatcgaccgatgatcgagtgaggtccgatcaaggtcaagtgggagtctgatcaatcggcatcagaacgcaggatcggcgtcggtcagcgctgtgtttcttgccttttcacgtcgggcacgaatgccacccgggaagcagagagcagagggtagaggagggaacaggctcgccggacgtaccctcgagctggatcttggcgacaccggaaccgtcggtctcgacgttgccgagatcaccgacgtgcctcttgtccgaggtcctgtccccgtgagtggacccgtgggggttgaagtgaggtccggccgagacgcacccgttggtgttgtcaccgaattggctgatgaggaggatcgggggttgacaccgccgggatcagctcccacgaacagggtcgagactataccgagtgagttggggacaaacgtactggacgtggaatcctcgcttggcgttggggtccatgttcttgatctctccggagacggtgacgggacctccctgctcggattgctcgaacgtgatcactccctggacgggggagtctcccttgaggacagcgacagcctgcgggtcggggtcgtttcgacggcgatcgggaagagggccgagtgacagggcgagggtgggggattccggttcataaagaggtgacaacgaggcagcagcagaaggtttgagacgatggtcagctgctggttcgtcttgcggatcctcggacggtcatcttggatcacggcgcaagggacgggacggatatggggaagccgaggtcatggtgacctctctctctcgccatcctcgttctcgtccctcgaccggatccaaatcgaccccccgtctcgacggcttcgactgaccttgaccattttgatgttttagatgagtgtttagatagcgggtgtggttggggtggtaggttagaatgcgaatcgatgcaaatagatgaagcgagattcgcaaagttgatagtgaatgagctatttagatgggcggggatagcctgagcatgagtggtattcgctgctgaggctgctgacgtgtgtgactgactgagcggggcaaggctctcattctcatgagcgtgggaagggcccgggaatgacaaaggatccatcagcgtaaagttgatcgattgagctgcaccgcggattgttcgatctgttcaactaatctgacatcatcacttcatcaaggatcataccggtatttgcgaccgctggtgctgctataggattcttacatgcttcatgtcacgccgccatttacatgacgaggatccgtacaagcttgtggagcagggcacatccgccctattcgacagcttttcatgggatgtgaagacgcccctggcttcttgacgcgatcgcgcctctccctcgttgctcttgcgcgctgggccaggactgcaggaccaagggaaatgggtagaaagattcagaccatgtgccagatagagtcccaacgatgccttggacttggggcataccttttgcgagtcccggaaactgtcacagacttgacgagatcgatggccctgccctgagcgcgagacgacctgattctgatagacggtcgatcaaccgccgaccattgcgtcatcgaattgtggctgctggtgacgcgggcggaatttgtggaatagccacgtaaaatcacgtgatcgttatttccctagcgagcgaccgagcgacggttgatcaccattgcaagcacttcccgaatagagtagtgtagtgagagattataccagcatcccgtcgactcgctcccacatctcacaccaactcccagttcagcaaggacgaacatcgtactgtagccctaccaagccgttcattgacacccagcaatgccgcccaggaccgctttcgcttcccagggtcgattcgacctgttgggaatggacgacgatgtcgcgtcttcgagcgacgaggagcaggtcatcgtaccccctcctgcacccgtagaggctcctgcatcgaaaaagaagtgaggattgtctcgtcagaatgggcttccggaggcgttcactcatctcgtaccgtcgttccaggtcgggcaagaacaagtcgtcagcgagcaccacgcccaccgccgagacgtccgagccgatcttgtcgacgtcgacgatcgaacaggtcgaggaaaaagtggagcagaaagcgagcgaattggccgctctcgctccttccctcccggacgtcatctccgatctcaccgcccgcaaggacgaggccgaggccgtggtttccaccacgatcgattccgcggcagagcgggtggaagaggccgtagcgtccgtcaattcgaccagcaccaaacccaagaaggggaaaaagtcgaaaaagatcgactcgaaccacctcccctcgacctcattctctcctacgctgccagactctctgcccgtcccgtcttcccctaacgctgccgctgcgacgacgacggatgacaggacggacgagcgacaagccgacgtcttcaattcaaaccataaacgtcccgccccgaccgaattcagcttggataacaagggcgccgctagtcctccctccaagggcgtcaagttcgaggatggcttgagtcccggacaggggaaagacggagagacggtcatccccggtgtcgggaggtacacgaaagaggaactcgccgtcgtcaaggacaagctcggcaaggtggccgacgtcgtgcaagaaaagaagaagagcaacgcgttcgagaggaccgtctggacgctcatcatgatcacctttttcctcggtacgtcgacggcctgaaacgatacgagcgtcgtctcgcatgtatgtatgcatggtcgagctgattcctccttgtccttgcccggatcgcagtcttgctcgctctcggatcgccttacatgatcctcttggtatttgtcatccagtgcctcgtttacaaagaggtcaccgcgctgttcgacctgtcctttagcaagtctcgccgtcctacaattccgtcaccccgtcgtgctaacgtcctgccgcgcggctttcttcttgtagagaacgatgcgaccgagaacaacacggaagccggcgatcaatggagcaagacgttgaactggtactttttcgtcgtcagcaactactttttatacggcgagagcatcatctattatttcaaggtgagagtcatcgtgtcgtatcgtaccgaagactgagagcggtcgagactgacactcattcacttgacggcccgtttccaaacagcacatcgtctttgtcgatgcctactttttgccgttcgctcagaatcacaggttcatcagctttatgctctacgtgttcggtgagtggcgacattgagcatggcaggattcgcggtctgggactgaacgtcgaacaccactacaggtttcatgggctttgtcatgagcttgcagaagcaatacctaaggcgacagttcggtctgttctgttgggtacatatgacgctcttgttgatcgtcgtctcgaggtgggtcgtgtcgggctcgagtgtgatcgtatcaatggctggcgagctgacttggacctcgtcacccgtgcgtcacagccactttatcgtcaataacattctcgaggggatgatctggttctttgtacccgcttcgctcgtcatctgtaacgatatctttgcctacgtctgcggtgagtcccgcttagctcgcaatgttgcgatgcaagatcgacgtactgaatatgtacgatttctgcccgactctctcaggcaagactttcggtaggacgtcgttgttcaagctgagcccgaaaaagacggtcgagggattcgtcggagccttcttttgcacgtcgatctttgcagtcctcgtgagttcagctagacagcgaccgaccggccgttctcaagacgagctgagcaacgacgtgtcgccatgatatcagtggggaaccttctttatgcgattcccttacatgatctgccccgcgcaagatcttggggtcagtgcgtggtcggacatcaagtgcactccgaacccggtctttttgtggacctcgttcgagtggccctccttcattcaagctgctgctcaatcggtggtgagttccggccatctactcgagtaggatttggcattgactggctccccttgatgcattcaatagatcggccgcaacatcccctcgattccttatgcgccgttccagatccactcgttgatcatggccgcctttgcctcactcgtcgcgccgttcggtggcttctttgccagtggattcaagcgagcgtttgatatcaaggatttcggggatagtattcctggtcacggtggaatgaccgatcgaatggattgccagtgagtcgcacgagcatgtctggtcgttcccgaagggggcgaacggtatcgaggctgacgatgccgcatcgcactgccgtcggggaataggttcatcatgggcattttcagcgcggtgtattacagcagtctgatccgggtgcatcacgtcaccgtcggatccgtcctgcagaccgtggtcaactcgctcaataccgaggaacagttgactctgttacacgacctgcagaggtacttgcaaggccagggcaaggtggccgggtcgatacgaagcggagtggccgcagcgcaacaggcgggggcgaggtcgtgaggccagggctcgttcgctgtgagaaaggttaccttcagtggacaggaaaacggcgagagttgaaactcgatcgtagatgttatagaggaaaggatgtagaagaagccggactgtgcgccagtgcaactagtaattatgatggaccgatgcataccaccgcacctacctcgcagcgaccccgtccggacactgaagttgtccgaggaaaacgatgacggctgggcgtatgtgccgagcccaaggaggctttttcttcgttgtttttttacttccgaggctgcgaacacggaaccttttcttgtcaatcgacgccgaccacaacgacgtcgacgacgatcagaggggtcgatacgatggtgctcctcataggcttggcctcgcgggagttatatatcatgccagcgtctagacaaggtcttctcgccgatgtgcgcaagagtcatggtatgacacttgttctacgacacgaagatactgttcgagcttcgacgacaccgtcttgttcagttcgcggagataggcgatttcgcacatggccgaaagcagaacgacgatcaatttatagccaccctctccaaacaagtctcggttcagcacggcagcctatacactttgcagacaaagttgctgcggaaagaccttacaaacctttacaagcagtacacgggtctagcccaaacgaggagtgtcagtataattcaaggagatcttccagaggcatgaaagggagacatagacgtactacacccgggcgatccgagtcgagcgttcgagccgtcacgacgtagtggtagtagtactgcaacaagaaatcgcctgatcactgagcacggtctttgccgttccgtcgaaccgccatcatgtcgatcctccagggaaataccagcggggccaaggggatggtcgctatcgaagagaaactcttgaatagacatcacgggcaggagcacgtcgctccattggctgaacaggaaggtgcagggaaggaagatgggcaccacggccatggccgacatctgcgccgtcgggatcacgaaaaggaggaaagttcgacggcggacaagggaaagggtaaagagggaggcaaggccgacggaccgcaaggcggattcgacccgatccccttgccaccgtcaagagtcgagacttttatcataaagatcacctttcacggagcggacacgctaccccctgccgacctgcacaatctttccgccgatccgtacgtcctcgcccagatggatacgccctcgctcgcccctcgacatcgagaggatccgcccctgcgttatcgaggccggacggtacggtcgaccagagagccgaaatgggaggatacgtggatcatcggcgggttcccaaaagaagggggcacgatgaaggtcgtggtcatggacgaagactttaacagccacgacgatcgactaggtcatctcaaagttcccatccgaaatctgggttcgcccgagtggaaagatatcaagcggcagcgtttcgagctcaagaaacgttgggcgggtcgacgggtcaatctggcccgggccgtctcctctaccctgagtccgctcaaattgtgcagaaacaagtcgagccaccatcgagacgaggtagagatctcgatcgaaatcatcgggagcctcaaaccgggccacgagtggaacgtcggcagggcgtttacattcggtcccgggcgctggtggcagcattattcccccctgctaggtcggataaccggaaccaaggggggagacgaacgtgaggatggagccaaggagggtcaggtcgagaaatacgagtaagtacaagcgtcaagtcggtggtccggctaaggctagatgacagctgacccacgatccgacattcagtttcgaggcaaacgagatctcgctcgcaggtccagttccttccgagctgtatcatcgttatgtcgactttaaatggttcgtcgcacctctcttcacggctgccgggatccgcgggaaacttttgaacaaggccattcacaagcaacacgcccgagtttatgcgtacgacaagagagctcagagcggacaattcgaatacgacccgaccgagtcggaccccacagaggaagtcacccggaaatttctcgaattggcgcattgggaccaagggggcaggcagtttacctatgtcctcaccctcaactcgatgatgagattctgtgagactggggacaatttcagcacggactttatgagcaagcacatgggtcatagcgacgcggacgtttacgtagcgttcgctggagagttcttgatcaggaggaccggtcctcgacgagatgcacccggaaagacccatcctcccgatcctctacccggaggcccccccgacgaggctcctccgaggcacgccaagcactatgagctcgtcattgacaatgacagcggcacatacaggccgaaaaaggacctgttgccgatcctgaaaggctacctcgagcgaaacttgccagggctcgagatcagcgtgtacgacgcgggaagcgacgagctcaaggagatccggaaacagcaggtggatgccaagaaacgggaaggcgaaggcgtcacgttcatgcgtcgtgggagcaactatagctcgagcatcagttcgtcagaggcttcagacctggacgccgcggcgaacgacaggcaaaggaatccgcgtgggtcccgtgcgcatcgttccaagttggaaagaggaatcgggattctcaaagagccaaagacggagctggaggccacagcaaagcagtattcatagtccaactcgtataattttccaacgatcttttcgtttcagttcttggttcacgctccgttgggatgcttctgattccccttgtactataggtttgttgtatcgactcggctcccgttcaaatcaattcgctaccgatcgctcagagactgctcttctggctagcgactaccgtgtcgagccactcgttgagggcctcgttgaattccgctggcttttcgagctggacaaagtggtcggcgtcgatctcctttttgaccaacgcgccgtcctcgaaatacttttccatgccctggctcatgtagggtgggagcgccttgtccctcaacgccccgatgaacaaggtcttgatgggcaccttgaactcggtcgatttaggcaaggccttttcatccctcgcgttgaggggcatgacccggtacgcgttgagcgggaaatgagcgccgtgacgcttgtactcgttgaagacgtagtcgagctcggcttcatccgtatacaaagtcggggtgaccttgccgccaagggcttcgaggtcgagcccgaccctagggtcaaagatgggtttcccagcctcggtcttgcctccagcgccaaagagggtgaaattcttgagcccttgatcaccgagctcggcgacccgcttgtctaccgccccggtagcgaactgacgttggtacgtaaagttgggaaggatcttgatgatctcttcaatatcgagcctctcgtgcgtgacgggcgtgaatggcacgcaggcgatgcacaaggccttggtgaattcggggtaccacagggcgaacctctgaacgatgaagctaccccagtcatgcccgacgatgactaccggctcggcctttttattttcatcgctagcgatcttttcgatcaactctttgatgcacgtggcgttctgcttggccgtgtagaattccaattctttgtgaatgtcatcgtcctgcggggcgtccgtacctccgtgtccgatggtgtcgaccgcgatgaccctgtaacccttgtcggcgaggtaagggatcaccttcctccatccgtaggatagatcagggaagccatggacgaggacgatcgtctccttgtaactgtcgcccttttggctaaagagatagtctgcatgaagtcgttcggttcaatggtcgagacttttgtggcagagaccatgcggtactcacggtacttgagcccattgacttgagcgtatcggcgttcaacgccaggaaggttaggaggggtcgacatgggtgtggttgtttggtctcgaagttgagatttttactcagtatgaaggtggttgtggaacgcaagggggctgctattttgattatgattctgatatatgagattgtcagtcacgataatagtactctgtctgtctttattaagcgacgatgtatgtgctggcaatcagtgtccatagttggtgacacgacatgttggcagctagctctacctatgctacatgcgggtgtttaagcccctccctcggctgcgcggctatcatctccttggcgcgcaaaagtccggatgatgatcacatgacgaatcatgacagcaaactcggatccgaccgtcaaacatcacgatggacttgcaatgggatcgggagtctacaatacgattgcgggattatggtataaggtagaccatgtagaatacgaagttactgctcgattcccactaccgcacaggcaggtgtctccgaacccagtaggaggaacgatgagtatcgggtgaaaggcgcaagattgatagttcagtgcgtcatggtatggtctgtgaatcaacgccggttctcggcagaaacgtccatcacagtcagatctcggggcgaaaatccgacaagcggttcacgtctcacgctcaagcccgactcctagtcatcctcgtgctcgctttctcggcacgatcaggcactatgacgaccctgccagacctcgtccgcgtgctcggcgtccgtgacaagacgatcgtatccgacgtcgtcgccctcttgttcatcttggccatcgcagctttgaccttggtgaccctcttgctcttggtcaacgccacctcgactttcgacgctcttgtgctcttgactccgatcggcctcccgctcgacctcgtcgatcttctcgtttcctgcttgacaaccccggggggacgcacgggggccaccacaatcgtggtgctccccgtgctcctggtgctagacctcgcattctgggtcggagcgggactgaacccgagggccaactcgtccacctcgttttcatccgccttgtcatccgccgagtcgtcgttcatgtcgaaatcagcttgaccagcctcatcatcatcatgatcatcgtcatcgtcgtcgacgacgactccgcgatccactcgatccggggaaggcgagccggtagaggggtcgacgatgacggtctcgcttcgacgagggattcgaggttgcccggaaagacgtttgaattcaaacgtgcacactttgaaacccgtcgccgaggagtgtaccaatttggccgaggtgaccgtgtagagtccgtcatagcgatatcctgtgaaagacgagcgaacagatcatgacatgacgaaatgaaatgaagattagcacgcacgctcggtcgcccgttgatttcctgatgatcgtgctcaccggctaaaggagcccattcgctatccgtcttgtaacccctgacgaccctgaccggtttcccagtcttggccgaccgcctcaaagccccgttcatcgcgtgctcgaaactctgatcgaacgactgattcgccgtcctcaggttcttgccgtttcctttcaaatcccgccctcccgcaccggtgaggacaaacgaggtccccctgtcgacgttgtcctcgtatcccccagaaaaacagatcgaccatgcgcctactgaggggttgcccgagatgcatgcgacgagcggggcgtggatcgcatccatcgaagcgcccacacggagcggccaggttttcccaacgggcacgtcggggatcgagccgaaccgtttgggatcatgtttccgggcgagcgctacgccttttcctagaccctcgccgtgccgctgtttcgggtggccgtcgtcgtcgctgtggtcctcgtctcggacgataaagtcgctcagcgatctctcgttacggcgggacggccggatgttcagcgggtcttcggtattacgggaactccgacgagtagggaccgaggaagaagaggaagccttgattcgggaagaagagcgggaaggttctcccttgacgacgggaggtcgtttgaccggggtcgccgtctttttaggtgcgagatggttgaccccgagaccgagcgattcgagcagggcctggttctcccggatgatccgctggcgctccagctcgtaagcgtcttcgacgtccatgatcggtgtggtataatgaggtatgctaggtccacgtccagaggtgtcaacgtatgggtcgacgctggacaattaattctataacagaccggcgatgaggaccgataaacgatcaacaacaaacaaccaccaccctgatcgaaacaaagcccgataccggcacaacaaccacgagacgagaaataaataagtgtcgcaccgcggatggcaaacaacatcatcatcaactcttctgtttcattcttggacgacactactaccctatgcaacagcttgatatcgttcacttcgacatctagttaatagcaataagcatcgactaccgacccctacccctccgagcccgcatggccctctggatgaaaaacgccttgccccgagctgctccacgtccacctctcgctcctcctcgtccacccctcgtcgacttgccagctcgattcggggcggtattgtcccacgtctttcctctcatcctcttgtccaccgcagcggcaacatcggcctggacgatccggtcgttggcgagttgcgccgccggtccgacgagttcgtccggtttcctcgtcgtcgtgcgacaccagtgcgtgaggtagaactgcttgagcttttccgggagcgacgagatggtcctgatcggatggatcaactcttcttcatctgcgagcactcccagtgcttccggtggctttgacgtgtctggaccgggggaatcctcgcgtacgggttgagaagggtcccagtcgaacgcgtcaaacccgtccatcccatccaagtccgggtcgagatcctcctcgtccgccgtcggcacctgagtgagctcatacttgtccagttcgtactcgtcccccatatcctcctcggtcaagtcgataaagtcattccccgtggacgcttgatgatcattggactggaaaggtagaccctcctgaggccgcttgccgagtgatttttcgctcttgaccttgacattgacttcgggcgagtcggctctctcgccattgctcctattgtcgtcgtcatcttccgtgtcatcgaacatcctcgccaagtttgccgagctggaatcatgcagttcgttctcggcagacgaagattccccgacgtcacagagttggtcattatgctggtcactgttcgtgtcggccttgttgtaacccgaatgatcctggtcaagcagtccagatgcagagttcatacgaccagtgcgagcgggacgaccgaccctcgcctctgggtcggaagcaccggcgtcgaaggcttgatcggcgacattgttcggtcccgactgcccatgccaagacgaccccttgtgtcccgaatcgtcatcttggacgttccattccatagcgccaccttccactctcaacccctccgtctcctcaggtccctctgcctggctactcccagcgatcctgcgtcgtttcttcgggcgaaccgtcgcccgtctctgggcgagatcggattcatcactttgcgtcgccccgtcatcatcatcctccagaggggcggccagacggatcggaaccgctttggtagtcttgcgcccttttcccggcatgacgggcgtgacgggaggtatgtcgaggcgattccgttgttgtttcagtctcgctgtcaaaaagaacgggaacctcacaatcaagtcagtgttgcgcacgattcgcccaatacgctctaggtgtgactgacctaacgcgcccagcctggcttgcttggatttggcatgggtcacagggacaccagcttgaacccctgtatgacgctcctcggcgtcgtccatcgaatcgccttcgacctccatctcatcgtattcggcgctgaacgggtcgacgaaatctttcccctggtcccggccagcagtggagctgctagggggggacaagataccgtacttgctcgtacaacgtctgagatcctggatctccttttccagctcgtcctcatcctcccctattacatcgtcgttatcgtgttcgagtcggaacggcttcagagggcggccatccgttaacggaggcgttggtaggccagacgctgcggatgccggagcgggacgggttggggagtttagatgtctagctgcgaggatgactcgtgaaggtgggagaacatgctccggggtaggcgatataggtcgatccagtcggtcgtcgcccttgagatcctcttgcccggtttcccctgcgccgttcggctggctgtcttccacggcctgttccatgggcatgaccgctcccatcccgctcaacaccgagaaatcaccgaggacgattcgttcgagtctctttgtggaagaagaagaaggcgccctccctcttggctctttcatctgctgagaaaacgccgcctcgaaggtgatgggttgagtaggtacgatctgcgacggagtttcagagtggtaatagacttggtcccacatgtgcgtagcaccagggagtgcggcctggttggcggaaggtgatggaatctcgctggcgatcttctggaagaccgagttttgcgacaaggataattcctcgggtctggatttcgcgggactaggctgcagatgttggtagagtggatgtcgactgggactcgaacgacacggagattgtcgggtcgattgactgctcgatgccctgtttctaccagcactcggtgacggtcgtcgatcagaccccgggctcttgcttgttgaaagacagcctgtggtatgagatgtgctgtgtaacagagcgtcggcctgtggcaatggccagacgattgcgatgtctggagaatggctgctcttgaccctctcgctgtgcatgacggctgcgtcgccaggacaaagagtcgtgctcgtttactaaggcatgctatgaccactcaatgccatgtgatagttcgtggatgatgtgtggtcgaggttgctagggaagcaacgaatttacgatgattgcctctttgacctcgatcatcatcctatctcatcatcatcatcatcatcctcgtcctatctcatcgccctcacgatttcgattcaaacgcgtcgcgtgtctcgacgcgttcacggcaaaacggaagagaagacacaggggagggcatccctagctagatcatctacacttcactcttgtcaagtgacgttgcgagccatgtcccagcccttaggtgtggggtacagagctgaaggaccgcgaggctatcgaggcgatttcgatccactgcgtggctcataacgaatgactgggtttatcgctgtcacggtctcgagcagtgggggtcacggaaaccaggctggaatcggatctgaatccccaagtggtcaggccaggtgttagccgttcgcgacctcgtcgatacgtaatatgttgatgagaatcggcagaaagctctggagcttgtatgatgtcccaagcttgtgccccaacatatgtgtagaacttggtagcgtggtatcaaagtacgtgggtggtagaacttagggaacgaagaggggtagaagagcgaagacggcagctggcagctggcacttctcccccaagaacttccgcgcagggatacacaggcgttctcgtaataccgattgcacgtccgcttgctggacttcccatctgatatcatcgttcagcccggtggcctaatatatgcattaatcatgttgagattggttgatacactcattgccatccctcgtctcctgatcggaccggatagtaaccttgttattccttcaccagactgtacggaaaaaatggacggagcccttcagcattggacctcgccaagccaacttcatctctcacctgactctgctgactctgcgttgtccaaattgaccgcccggacctccttgatccccagctcgaaacgaccttcgatcccactaagcgtcgcggcggtatgttgaccttcctcggagacatcttcacccggtcgaagacccgtggacggccgtaaaaccggttgatccctcgtttccttggcttggggagtcaagtcgtcctcgatcatgtccacctcgctttcaacaccggggtaagaccctctcctccccccaaccagactcgcagcttgcccgcccggttccctccctcctccaaggatactgaacccgaccgtccggatcttgttcttcatcatcgggatctgggtatcactcagcgctccagagttggtcaggacgaaagcgttgagcgggacgtgaacggtttgccactggttgtatcccttgcctgccgtcagctgggagggtgatagggggagtcgatgttggaacagatctgagcggaccggtccgtcagtttggatattgacgaaccagtgacgcagggtggcgggttcaccagacggccgtaatgtgatggcgagatgagtgtagagggaaaggtcgtgatgcagagcaccgaacatggtgggcaagttctggagaacacaaaaggtcacgctcggaaatcgtcaactcggtggctcgatggggggacttgccgctcgacatgtcgctttaccttgttcctgaagccagcatagcctcccctgacttttccctcgtactctctcttgacgcctagacgcatttctccccagaatcgaccgtcgccattctcatcgagatcgagcgtgcaggtgctcagaccgccgatatcgctgtcacaccctgtagcataatctttgatgttcaagttggggttctgagcggctgacaatgagtagacgaggtgaccttgtttcaggtttggtgatgggttggcactgagaactggagaggagagaaagcgaggtcgaacgtcgttcgggtgaaacggatcagagtttggtgcagctgatattcgagggataaccccaccttttgcagagttttgcttcaacacctggatggatcgttcaaaataggctctgaagggggaagtcatctttcgtgattaccgtgctcgttatcagagtatagttggaatgtcaagcccgagggacgattgcggcaggataggtagttcattccaatatgtagaggttcaactcgaactggtcgacccgccgctgctcggtcggtcgatctgataatcgtcatctcgcgctaaattgtcaaaactactctgatgagaaaatgaatatacgatttaatgtgactggtcgtttctaagaatcgaaccctgtcatctgaaagattgatagacggccgattctagcttgaccctccattgatcttggatttatcgttgcaacagaccctactcataaggtcaaggcacttgtaatttggtgaccatctttgcgctgtagcccgatatactggagcgtgcaaacccgagagtagtccttgcggtggatgcctctttcataggtatcttcatccgaatcgacagcacaacatcttcaattcatcctcagcattatcggtataatgagaacctggcgagtgaatcgccgtatcagctaaggaaacatgaggtgtctcaggacgtgtaagcccgtgaaacgcaaacgtcaaggccgccgcttctgcgacgcgcggcgattctgggtgataaagcacggtgtctgataggaaagaagttgaagaagacgagtgaatgctaggtatgacctagtgacctcacgacagtccgccagatccgggcgaccgacggtcgggacgctggtcaatttgcgacaagagtcggatggcgcttgcggaacaaggttctgtttggcgatggccgggaactaatcgtttttgatccgagactcttgggaaaccgaccgggctagacgagggcacctccacgtcgaacctcggactcgtcctcgatcgaggtcgaaactcgtcaaatagttcatccaggcaatcaatcactctgcccagctagtttcagttgccagacgactaattgcggatcatcagtcaacatgcagaccttttccctgaaatccctctttggccttttggccgccctcgtcttgacgctcctcgccgtcactgctcagggagccgacgcggccaagggtcccgtcatcaccaacaaggtctttttcgacattgaacagggtggtcgacctttgggtcgagtcgttctcggtctttatggaaagtgagtcgccgacgattcctcacacaagcggcttgtgcgacagagcggcgattgatcgtgcattctactcctaggaccgtacccaagaccgtcgaggtgagcctccctttcatcggcaaggcagcaagctgtctctcgggactgatcggctgggtgcattctttagaacttccgagctctctgcactcagcagctcgccgatggtacttcgatcgactacgggtacaagggatccaagttccaccgagtcatctgtaagtatctccctgctcgatcccctagagccccgcctcgtgcccatcgactgaccccacttgattctcccctgcagccaactttatgctccagggtggagactttacccggggcgacggtacgggtggaaagtccatctacggtgccaagttccctgacgagaacttcaagctcaagcacaccaagcccggtcgattgagcatggctaacagtggtagggacaccaacggtcagtgtttcaaactccaaaccggagaggaagagttcgtactgagattttggcaatcgtatctctgccgcgataggttcccaattcttcatcaccactgtggtcacctcgtggttggacgggaaacacgtgaggaccagcaagcgacgcttgccttagtgatgaagctacgatattcacgttgacccgatcttgctcctctttttctaggtcgtattcggagatgttctcgaaggcatggacatcgtgcacacgatcgagaacgccaagaagggtcgaggtgacaagcccgtcgagtgagtctttttgtgtcgagtcgtgacgattctcctgccgatattgacaacgctgctgcttgccgcttcagggacgtcgtcatcgccgacgctggagagcttcccgtcgagaaggaagttgatgccgagggcaacgaggtacctctccgaatcgagctctaaatatttacacctttcccctcccgacaatctatcgggagagacgagccggaacgagtcggtgcacgttgggaaccgctcgtgagctcgtctcctacctcgcggctgcttgtatgaaagggcggagatgagagtggcagtgaaagacgaaacgaaaacgatatgattcaaaacagccacatgcgcgctccgtccgggtcgggtcgggtctatgctcttttttctccccgggatccgtcatcttgtccaaacacgagggctgacctgaagtctccctctcgtccttccctcatttccctccctttgcgtgtgctgcgggtatcactcgctctctccctagtctatcgaggataccatcgagaacctcttgaacgccgacccgatcgatcccgtgtatatcgatcctacccccaagctgtcatcgacccgctcgtcgtcgtacaccatgttcggactcgtcctgctcgccgtccccgtgctcgggttcgtctactggctgaggggtgagagggggaggctgttggtcggtcggatgacgggccgcaaagacaagggacaagggtacggcaggatccctctttagggaatgatggtagctttgcggaggaggggaattattcttggactcgtgccgagagcatgtcatcatcatatagtacacgatcgtcagagttgtcgtcattccttgacttggatggaaagactgtcccggcgtttgtatccagcttgtcgagtcggggccagccatttctcccccacccatgtttcgaacgtcttgccatttgcccgctccgatcgacaaaatggaactcggtcatcgttgtaccgatcgagaagatcgggaccgagattgtgtgtgaggggggaggtgggctgaccatcgtgtgcgcgagagccgctgacgatcgttgctggaatccggaatgatccactctgcatgattgcctgtgggatcctccccttgaaacgggggccggccacagggcgagagagagacgggttacgacggaagctttcaagggcgagggctgccgtgcatggagggagtgacgcgagctagtcggaaaagtttaattttgaattacctaataaaaatagtctagcgtgtcggccctgtcccgccttcttgcctgcctgctgcctatttctctctttctcgctttctctctcgctcggtcctggcccttgcgcactttcggatggacgatgcatgcgaatggcaaaccaggtgcaacgtctgcgagggctaagcaaacaggcaagcaagcctggctcagctccgtgcatccttgctaaccttgtgacttgtcgggcatctgtcggcgtcagtacaggtggatcaggtgatcgatctcctttttacctgcacgtcgagtcgttttgaatcgatactagctactggtctggctcaccgatagctctagcaaatacatacggaccagtcgatacccgcaagactacgaaagtaagctagccagctagtagctactagtggtaaaatataggcccatattgtccactcgctgcaagagccgcaaaggatctcgaacacattacattccctacacgaccttggcgcatctcaggatggcgagaaactagacgataatcgcgacgttctcgtttagaccttgacctctttacggtcgaccgaccgataccatggtccgcagcgacgactttgacattgcccagctcggattgaccgatttcctcgaggcagcgggaggaccggcatgtatcgtacggttggcccgtaagccgacgagctcgacggacgagaccctcgaccacggcgagcatgagcacgacgacggtgtggtcagcgtgatatggcagagccgtctgatgcaggacgacgagacacaggattcggccgttcgtgcaatcgaaaaggcacgggacgacattgtcacctctacgacgagcagcttcgtagcatgcgacgtctctgtacaggttggccacggtggacggattcgatggcgttgcgtacctcttcaagcaggagcttattgggctcttacgggcagagaagaagacgatagcggactttctggaccgtcggaaccgagaccttcgaccatgtccgccaacatgtcgtccacctcgtccatccccaccgtcgaccctcgctcaaaagtccccagttacgaacccgaagtcgccgacgtctttgtcgaggatggaccggatcgattggattggatctccgtgacgggtcgtacgccggaatctcgggcgttcatcgaactgttcaaggggatggattgggagcatgggaaactgggtcatccgagtggatggagcacgagtttggtcaccatggtcaacgtctgcctgtcgagtccgttcccagtcttgcttagttggggtagtgacaaggtcttgctctagtgagtctgacggcattcgacgccttgtcaggaagccttgcgtcggctatcgattcgggctgaaccatatcctcgtcgtcgttcggtatggcagtaacgagcattacagcaaagtcatcggtgcgaggcatcccgagatccttgggatgccttacgacgaggcttggccagaggtcagtaccagagtccgtgcatagcgaggatcgaggatggaaatctaagtatgactcgtctcgtctgtgcttttccgcgataataggtctgggacgctctcggtcccgtcgtcgaatcggcctacaacggaaacatcgtgcacgtggaagatcaagagatgtttttgaagcgaaaagacatcctggaggagacgttctttacatggagtatgatccccttacggggtgtttctggcacagtcgagggagtgagtactgtcgtcacagatgcgtgcaatcagcatgggacgatcgcttatagaaatcacccggcttggtagctctttatcccgaatttcgatcgaagcaacgccgtcatatccaaaaggcgtcttggggggcttcacgagatcagtcggcatatcgctacagggacatcgcccgacctcgtcatggaggccgctctgcagggtctcggtcagaactcgcgagatattgggttcgcactgctctacacgacggatcgggatggtgtcaacgatttcagcaaggacgcatcggtcacctattcggtagtcaggaccgcaggtgcagattcggacagcatcgtcttcaacggtgatctcttggcggaagaactagcggacgaggagaccgagatcacgctcatcctgacgggcgtggtcggagccattgacctcgatggaccttgtgaccatcttcctcggacgttgacctctcatcggtcaattgcggcagacgaatgtgaccagtctcaattgacggatgtgatcaggctcgctcatatccgggacgagttggtcctcctgcgtgacagcgagatggccgtgttcaaagattctttgaaaccgaacgttttcggcgatatacctcaacaggcggccgtgatacctatcaaggcgtctgcagaggacaagtgtcacggggtgctcgtgatagggctcagtaccaggcttactgtgagcggcgtagcggaccaggcacgttaacgggttctgatcattcgcctcttcttttcagtttgacgaatcgtacgccaattggatagctctcgttcggaccctgcttgccaacggtcgggcggcagcggaattgcatctggaggagaaactccgagccgaatatctcgccgcgatcaaccgacaaaaggctcgagaactcgaggtcgcgctagaacgcaagacacaggaactcaaagaggcggaactcaagtttacttcggcttttgatatttcgccggcaggaatctggatcgggtccccggatggtcgcgtcgagtttgcgaatcaagtctatcgccattggagtgggctggagaccgacggatcgctggacaattggatggacaaggtccaccccgatgacaagggcaacgtttatgatcaattcatgctctgcttgaaacaactcgtcaaggcagagttccgtttcttgactggcggtacgaccgaggacggccagcctgaagttcggtggatagaggggacggcacaaccagcatatggcccagtcaactcggatacgggcgagcgtgaggtcctctttgttacgggagccctcatcgatgtaaccaatcgcaaggaagcagaggctttccaggtccgacgggcagacgacaacctcgctatgcgacgtcagctggaagactttgtcgattacgctagtcacgaacatcgaacccccttgttcggcatgggcatggccattcagtcccttattgatcggctgaaatcgctaagaactttgttgccagaggccaaccaagccgaagttgacgacgccttacaagaagccaatatcatcacgctgtgtatctctcatatgcaaaggctggcagacgacatccttttgctaagcaagctggatagggacatgctcgtcatgacgccggccccttgtcgacccatccaaattgcgaaagatgtggccgaaatgatcgtcgcccccgagcgcgatgtcgagtatgcattggaggttactccgaggtatgaagaactcgtagattgggtcagcgtggatccgcagcgagtcgctcaggtgatcataaacttggtcaacaacgccgtcaagttcactaggaatcgttcggtcaggcgaattatcatccggcttgacgcgagtgtggtcaaaccccctatcggcgtgggggaatttttggacgagaatggtctcacctcggtaccgaagcagttggcggacgaatccagggtcatcatcgtatgttccgtacaggacacggggattggtatagagccagacgaggcgaagaagctcttccgacgcttccagtgagctaaagcttgtcatctggtcgatcgagttccccaagctcacgttgcgatttctagacaaacagtcaagacctcggtaacctatggtggaagtggattggtaagtgtgactcgaagagttatcagtcaagcgcatctgacccgaatttgctatcatctgtagggtctattcttatgcaagagaatcacccagaagctaggtggcgacattacgcttcagactgaatatggtaaagggtcaacctttaccttttacgtcgaggctcagcgttgtggtgctccacctcaggatcccaaagatccgttgacaccgctcgtcaacaaggcctcgggatcggaacatgctgtgctacgcgacctgcgtagcgaggccacggtgcccctggtggacagttcgcatgcttcattagacagggtggccgaggatatactcgacgtttcaaagctagctgcgcctgaccacaatcctacaatccgagatgtcatccacatcctcttggctgaggataacatcatcaaccagaagctattgcagaggcagctagtgaaagccggattcgccgtcgtcgtagcaaataacggcctggaagccctggaatacatcagcactactgcgatttcgtctgtcgggtcgctacccttagactgtattcttatgggtgagtcagagctgatagacaagttcctgagaatgcctctctgacctgcgggaatcctcagacatcgaaatgcccaagatgggcggcatcgaatgtaccggcgagatccgcaagctagaagcgggaaattcaacgctgcggcggatacctgtgattgctgtgactgctaacgccagggcagcgcagattcaagaggtgagtacggttcaaagtcgtcactagggctggtcatgtacttgaagacttaccgagaaattgcgacaccagatgctggactctggcttcgatgacgcgatcgctaagccattctccatcaaggcattgacgaccaaaatcaacggactcgctcgagcataccgagcgacatgattcatgaaacgatgaaacgggcataggattagttccgggtcttatacagttacttctcgcatagcaggttgtatgacgattgaatcgtcgcgttgtatagataatcgcagcttggcacatgtactctagcatcagaagcatataaaattgcatccggatgatgtcacgcacgatcaggtcatgcgggtttcgattcagtgcaaccttgtatcttcgaattgctattgccatcaatcctggtcaccgcaactgtgagctgacaataccccttccactgtacgatcttgccttcaactccctgcgtggctgctcccaaaaatccagtctaaggttgaccgtcccctgcgcaaatgagtcgcagacagcccataccgcctgccccaatataccagcttttatcagctcgggaggatctcaggcagcaatttgcttacatcggactcgcaggcgggcctgccagagtgtctcaccatgctatagatgaacttgcagtatctatcagaggactggaaatggagttctcaggcagcgaactagaagaagcctttcgtttctactctgtggagaggagcgccaacaatgcgccgtgcaatcgatacggaaatatatgggctttcgatcggacagcggttaccacgcctgctaaatctggctctcgaaaaggagaggaagagctttacctcaacgcaaatatcgtatcagacggtttaggtaattggtgggctgcctctcaggtatttgtctttccctttgtctttgcctggagccacagttgatcgaatcgacatggtcggtcaggcgcctactccgtctacgttcaacacgtactttcatgcgatccttaatgcatcggcgacgaagcgtcatgacgacctgttccccgtacaagaaacctctggcaagaggaactcgacgaagcccaatgtcgcgatgatcattcagcttaccggatggtttgatgggaaagtagccaaagcagataactatctgtcagtatcgaccttgcttccgctgttgttcaaatcttgacgtagctgatattgcccttcagaccaaagccgggaaagccctcgacctttgtatcgccggaggggacttctctgcccataaaattggcgcttatcgatgcaaagcccgatgcgcagatgacccgatccaccctcaaactatcaacagaaggcaatgaacccatgacgatacatcacttcttgttccatgcctggccggatcatggcgtacccacaacgagcgaggacattgaagcgctcagacagctgctccagacgacatcgaaattgcaaaaggaggaaatgtgcgaagtctacgtcaactgctcggcgggcatcggaaggactggtacattcatcgcgctctggtcgttgctcaacgaaccgatgaaatccacgaatgcagaacgacgtgcaaagccgacgtcgggcctgaagccattcccggcgtgggcggctgaagacgcagtggccaagacggtggatctattgagggaacaacgaggcatgatgtgccagacacagagtcagatcgaattgatctatcgcatgaccggacggtcaccggctcgaccatagtgacgcacacgtcaaactgtagccatcctggaagatttgaaagccgtagatgtctcattttatcaggtatgcgcatcaacacgcctcggccatccgcaactgcgttgaacacctgtaaacatcagatatgcactcttcgcctgttgagtattatactactgtaaataatcatgcattcttaggaaacagatacagtgatataggggcgagaatccgcaagagatatccgcttctcaagacatcctgaccatctcgcgtctgaggggcctggcgagccatagccaggcagcaaggacgaccggggcgaactcaaagacgccgaagagcgcctcaatagaagatgcgttaccccaaacacctggaaaatgatgtcaggacggattcgttagatatcctgctaagagccatgtcgagggcttggcttaccttcagcggtctcggccaaacggtagagggtacgagcaaagatcaacaagctcgagatgaccaaaacccagaggaacgtcctggtgtacgtgtgtccacttcgatcatgatggaccagaccagcctctgcggcggtagggctcgaaatgtcagagttgtggcgtttctcgttcgaagcgttgtgggatcggcctggagccttcttgatgcggacgaggatgacagccaggatgatcaagaagaccaagaacgacgcgttctgagggggtgggagacgtcagtggaaaggacttgggaaagcacgatcgccaacgaatcaactgacctgagctgcaagaccagccagaagaatatcgttggcttgttccgacgtgatcggactgttgccctggttggctcgcctggactcggccactccgatcttgacaaaggaaggcaaagaagatgacttcaataaggttcgaccggctatctgaactgcacatcgtctcaccaaggccgcaccgacgatctggaggatcgtagtgaaggtgtcgattgcgataaagatcttgacaaacttttctttgactggtgagatctttaagttgtcgtcgttcaggttgatagcgtacttcaacgccaggtagaccgctgcagcaaaaaagacgggggcctgtgtggaaagtcgaacagtcagagtcggatgtaccgccgaacggtcccgaccgactcacgatgacgatgaaaaagtattggatgatgaacgcgttgacgtaaaaggggttcttgttgctgtaggtcctaaagccatatcctactacctccatcacacagcccagcgtccacaaggcttcaaaccaacgggtcggtcgaccttgaccatcccgagcgactcgcttctttccgccaatccaccaaaagtaaaagtgaccgatcgcggccaacccaaagaggatggctccgatcaaccccagggcgagggcaggcgtatagttgtagatggagatccgagcttcgccatctggaatggggttcttggggttgaacggaccgcgatagttgccgtacgacatttcttctatggatgctcgtcgtcttttcttgtcgaattgattagattaggggtagtagcagattaggcgcgaagttcaagcgagcttccagtgcccggtttggtcacgacctgttgcttgttgttgatgtcgatgatcagccggaagttaatgatgaggatggacgacgcacaccagcacgcagacacactctctctcacacacacactctgttataacgggctcgaagccgacagaacgagcgagacgggcatccaccacgatgcccgtctctcgttctcggacgactccgatcagggccagagtcaggcgaagatgacgagcatcggctcagcgccaagagatcatatcatgatgattgcttccgaaccgcggtcccgagccaggcgagccaagcagacgtgtgagaacgccaaatgacgtcggggaaagtcacacggatcatacgggaatcaagaccccgctgcaaatgttataaccacagcaaagtacacgcgaccagctgtaatacccaccatacgcccaggaaccccggtacgaaccagttgcctaaaaggacccactgtcgtacgagctcacgccactccgaatcgacggcgggcaatatgccgacgacgcgcgagacgatcgcgataccttcaggcgtgaacatttggaggacaatcaaccggacgaacttgatcacgacgcgtccccgcgactgtgtacgatcgtccatggtccggtcggcttgtccaggggcggagggaaggaccttgatggtaccgaccggacgaggtcgggacacggccatcaggatcgtcagaccaaggcccaggacgaccgcctgcgggaaattgatcatagccaccgcggtgacaatggcgcctcccaatatatggcaggcagatgacgttgccaagacgacggcatcgcgatcgagcctgttgatgcggatctcgttgccaatgtacgcagcgagcgagtacgaagcgagaagcgtgacagggtaggtaggtaggaccgatccaagaggtgtcagctccgcagatgcgaacagcttctaaggcgcaaaaatggctttagatggcgtattgctcctgcgagagccgttggaaacttacgcctgacccggtgacccaatcgttctgagctttcagccgccctagcccaacgaggagagcgacaccgaagatttgtacaactcggtcgacccgcctgttccgcctcgtccaccgattctgctgacttctgctcgaagatccattcgcttggacccatccgctctcgatccacattcgcaatccctctacagtcaaccctgccccgagcaagatggcggcggggaggtaattgccgatcttggtgaaccatcccggatgggtcaagaggtagaagaagaatgacgcgtggaatctctcgagcagattgttgatcgatcgaagggtcgattccataatactatcacacagattcggcggtcagcttcatcctcgccgatcatgaaaatgagagacacccacattcctaaagcatggaaaccatgcgggccagttgcaggttctgcgaacagggtaacaccctctattcggtacttggcgaatgttccatggctacccgcaggctttccaacggcagcgtatgcaaaatgctgcttcaagtgcctccaactccgacagtacttagtaatggctggcatctttgcggtgtcacgcagcgtcggtgggagccagcgcggaagagccggtgcattgagctcatccgataccgagtggtactgcaccggaacaccgcccgtccagcgggcgatattataaatcgcattcaagaggtcctggtttggcagtaccccgttcacgcactctaaaatttgtaatttggttagttcgaaagagagaccgcattcgcgcacgcagaacttgccataatacaagcccaggtgcgagaacgaatgtccgggataatcgatgttgatgccagcccagataactccttgaggtgcaaggctgagcggatcgacgaccagtcctggtttcgaggcaagcggggttcagcctgtctttccgtaacgccgagcatcgcaagactcttacctgagccggccataccatgataggctgagagaaacgcctcgacaccttcgatgtactcgtcaccgaatacaaacacaaaatctcttgcccagtgattttgacctgatcaaacctagtagtcagtgggcggccgatgatcatagcgcgtatctgttactcacctcgcaggaacttcgccaaggccatcacgttggcaatgccccgcaggttccaccctccggtcaagctcttccagttggccgagatgagcacactttcgacccctgatgaccgcggaggggagatgatagaataggcgttgacgccctctgctggctgcgtaaaaagattgagctccttgagattgaactcacgagggctctctcgcttacgggatcgacattttcgtagaggtacttcgacgtagaagacgaaattccaagcgattcgagttccgtttcgatgaactgcgcacgttcggccgagctagcgttcctgccaatcaaagcttccagctgtccgagataattgtccgctacatgtacatcgttccagttccagtgagtcgtcgtctatccgatagtcgggagaccagtaagcggatctgtaaccagggtgatgacgagctcgcttacctgagctggcgagaccgcattctcgtccatataggtacttcgccctaaatcgtctaagggcaggagtaagagccagaccaatccgataatagtcagagtcgctctacggatggccctcttgtatcagctttcatcacccgtgcgatcatgaaacctttccatggtgatcgtacctaagcacccagatgtgatgatagatggcctcccgcagacggtgctgtcgacgtatcttgccgacaaacgattgagattcgacactatcgttccatctctgagccctggtccgctcttggggctcgccaggtgttgatttgctggaccgttccaaagcacggcgaagcatgttgaagaccgggaaggagatcaagctatcgcggactgtgcatgtgtttgattctcccgtgctagttccagcttctgcgtctccgagtgaggatcagagtagctcacagctatccttcgagatccacgatgtcttgttagggttgagatgtacctcgattctatgcagatatgcaaatacatgtgatcgatgagcccacgtatagcggtttgaagcagtcagtatatttgccgccggtttcggggaaattgcttccgccaggtcgcgacgaaccgtatttgcgttggtaggcaggcttcgcccggctggtaacgcgacgctgaacctttttcctcaaagtgacctgcgaattcaaggtaacatcgacctgagtattctgcccttccgcagcgtattaacaacagcaatgacgatagcctgatgctggacaatgtcagagagcatgatgggcgagcttttacctacctagcacaacatcagccacacctgggtgttatacaaatttctctcgatgtcgacccgacatggattaaaaccatagaccgtattgtgctcttcaccgacgacaacggtgatgacgtagcttggatcacactggaggataataacgccgagcaagccactaggtctgaggacgtgctcgagaagacatttgctatcaagcttcctgcgccagcagaaggccaggctgtacgattcaatgtcgacgctttcaagaccacatacgagttcaagctgtcgtccagaaggagtccaggcgagagtctgccctcgcagcccccattgtctgcgatagagctcttgctctttcaacctgagggactctcttgcacgcactgccatcgaccgctagcggttctgagacgagatggcaagaacggaccgttattccgacctctaccgtctcctcattatcaagagctcatcgaagcgtacttgtgtcatccatcgggagattttgcgaaaaagatggatgacgttggtgagaaagggttctggccggatacggttgccacgacggaaggacagcgagaggtcattttggttggtgaaacggaattacgactagatgccacgctggtcccggatcggctccgagggcaaatgacagacacttcggtaagtgctgctttcgttcctccgccatctctaccttcccctccttcgggcacaaaagaaggcttcgagtcctctcatccactgagagtctatggcgagaagaccgatacaagtgccccagatcaaaactaccacaaatacgaaggccgagcgagactcatcgttaccactctgtccgagttttttcggagacgacgactttggaggttcgacgaggacttgtatctggcaagggataacgcaacccaggcttgaaacgacccttgatgctccgagttttgacgtcaagggctactagcttagggtacagaaaaaaatcatcttctcgtttcggtcgaaggtgtctacgttcatcaggagctgagacacggttcccttctgatctaagcagatgattttatctctatcccgctggacagactttacatgcgaatgtggcagtatcgtgggagaatggaatcgacatgcgcaaccccaagagcgaaattctgctgctgctatgagagacaccttgaaattatggaaacactccatccggctaggccgatcagatgggtacgtatcccggtctgctggcttcgttgttatacatgctcacgggggtacaacacagatcggctcttgcgtacaaaccagaggttttcgttgtcgcggaaatgctcagcttggcgcaagctcattcgaccagacgtttcatgctacacgagaccgggcaagagcacctcgagatccctcgtttgatggtatgttctccacgcgctagagtttgggtgttcccggctgatgacgctgcccttatttccagttatggctgttccaacctgaaatggcgattgcgtctggagcagctttggagtctggatctgtctgtggaacgaggagcgatgttgctaagattctgtattccttcccttccaaaagcccagacaggtcagttatgacacgtttgtacgacaaaaggatcgatcggactgaccgactcgaacctgttccggtcgttcacagcattgctggcgaaagagagacgctccagattgaacccttgtcgtacccggcggagatcatcgatcaggtccttgttgctcttcgaagttccaatgaactattacccatggaacagcggaggatgggttcccacgaggttggatacctcgctcgatgttagacttttgttcgacacatttcatatagaccatatggatcgctctgattataccctcgctagcttgattcggccaatcgttcaaaacactcctgaaggccgacgattccatggacagctgtcacgctttacagagaccgagcttcctcccgatgtctctctgcgacagctggtcccgttgttaccaatcccaacaacatgccacgtttgattcccatgacctagactttgcacacctggatcatcgagacggaccggttggattctaacgtctttgagccacgattcgcaaagccgttgtgctgacttcgtggctaaaaagcctctgtttccgtttcccctgtgatcgtcgtcagccggaatccaagggctcgggcaatgctgcatttccacggtatcgggacagcgtgaccgcgccgggtgcatacgtcattttgatcatcatctttgtcttttacgcgatcgccgatcgagcgcgatctgatcgattaccatgtagcggctggtcactcgcttgctgactgcaagacctgtaggacttgcctgccgacaacgtacgatccttatgcttacctcgagccccagcatttagaggacagaggtggcgattctgctatttcatcagtactacttaggattatcgagagaacaatcgctctctcacccttttaccgaaccgaaattcggagctcgaacttcaactcgccttataccgaaccgtttccttgactgtagacagaagcaatagacttgaacacttgatcactcaacatgcctagacgttcaccttcacctgactcgggtcctagaccagcaaggaagagagtcctcgttgtcggagccggggctgctggaatgtcctgcgccgagcaactgtctcaacatcctaagacgtacgacgtcaccctggttgatgcacaggactactgtggcggtcaagcatttagtatccctatcgatgagaagaggcatgggagttcttggatgaaccaaggtgttcaagggtgagcagagacgggtcttggcggccactgagcggtcctgacgtgctgcttgtcaataggggttcgtacatctaccaccacacattccgcatgtttaagcagcaagggttcgaagctcagccgtgagtaggaggacgacgggtactcattccagttcagcttctgacggacatgtctctcattccagcgtcgacctgcaggtgtctttcgggaaggatgacaaggtgagcctctgcaatcggatgtctgcgcggaaccggtcctgatcgtccgtattcaatctctagttttggaccaacgcgttccccaccgatctcgtcgccaagcatcagaaagagattggccgtttcaagtgggccatgaggacgatcagatggaccgaagccgtctgggcgctcatcccgatcaagatcaccctcaagatttggggcttctcggacgagtgagtgtcaggcgggttcgcaatatattggtcgaagaaagacggtcgactaaccaatcttgagcttctttcgcaggttcatgaactatatgatctatcccaggttagcaatcagaagacgccttgccttttcatccggctataacctgatcactataatacagtctcgccctattcctcggaaccggcaacgcaacccccgatctgcccactgtcatgatggagcgtttgtacacctcccctacttatggaatgtgtaagtaacggaatttgactgtggtgtaggagcgagccttgctgatcctgcgagcgcaaatcagggtaccccgtggacgaccactctttgtctagcaacttaccgcctatggtcgtgttccccgaggagagcaagttctacactcagtggcagcacgacatggaaagtcgaggcgtgaccgtccgcctcaacaccgagatcgtggccattcccgagcgatccaaagaccgggtcagggtccaacttcgaggacgtcgtcctcagcccgatcatcacaatcccgtaggagcggaccaggatctccctgtcactgaagaaacctacgacgagattgtgctttgcgtgctcgcggatactgccaagcgactgctcggcaagaccgccacttttatggagaagaaggtcttgggaatgaccaaatggagtgacgacatcactgtcacccacactgtaaatcaacgtcgtgagaaccgaaaccgaaagtttgctaactcgcgctggcataatttaggatctggattacatgaaaaaatggtacaccatggatatgcccgagaacgtgccaaagacactcagcgggcgtgacgagcaggaccgaatcgatcgtggtcgaaaggacttcaacccgtatgttcaccttgaccgtgatggactttgcggtattccggtcccggttctgatgtgttcttgcgctcggttaggatgtatttgatcaagcaggtgcccgatgaccctaagctgcttgaaatgtgcttcgactgttccaacttccagtatcagttgaaggatgccaagaagcctgtcgaggaccacatcttccagaccattttcttgaacaagaaggacaaggagacttggaccatcgacgagatcaaggaggacaaaatcagtgagttcacgctacgttcatacttgttcggatactttttgaccgacaatgttcgcgcaaacagttcgcaaggattggtggcatcagcttgagcacagatggagtaagtcttgtcggccggtttggctgttggccgccgcatattaaccgttccgtgtctcattgcagctcattacgccttcgtcgtacctttcatgagcttcttgaacggaaagaagaggacccactttgccgccgcctggacgctggtcaacgctcacgagttggccgtcatcagtggtatggccgccgcttatgcgctcggtgcggcataccctgaagacttgatggacgagtgagcacgttgaaccctcttttgtgccaaatcatcaggctgatgaaaatccaactccgctgtgatagtgcttttgcggtattgtgcttcaggctgtacctgctgctggatcaccgaaaatggttcagcaaaaaggacaacgccaaacgacttggcaagcagtagaacgcgattagatcgaatgctgtccgattgctctataatactgtacgatctcaagcccaaggccatggctaaatgtatacattttcgtcctatacaatgtgaagcgccgtcacatcgcttaatggacacgagcggagcgagatagttgacaccattatcgcactggcccttccccggcttagggcggtggcttctgggcgacgcgtacaatagggcgacagcatatgcgtcatcctgaaccagaagcagttccccaggccgctaaacggaggacaacatacaacccacttcttctgatatgcagaggaagttgccatacttgcaggttttatatcgtaaagaacgaactggacacatttcaaaaacatggacggcgcttttcggaaaattaacatcgacttgctcgaggaggacgtactgctgccttccgacctttacgatcccgatccaagaggtgcagatggtgtcctcgctgatgccaagaacaggagtggggaggttcgaggcctcgtgtcaaagtgagcacttgttaatgtctgacatctcttgcgatagccctgagaagtcattgatgccagctccgcctgtttgttgataaaggggtgacatcgcgtcggccttgaacgtcatcctgactgactgcccgtatggtgaggacgtcgacgaagccaaggtgagcatcacgagatctataagcgttcgtcctcatcgtagctctccacgattctgatgctgcctctggattcatccaggacatgacgacatctgctttgcttttgatcctcaactcgacccgatcgaccgacatcagtaaccttgtcaagggtctaagtggtgatcagcaagatcgacttatggcctatctatacaaggtaagctataacggaatatcgtgatgccccatctagctggctgatcactagcggctgcgcgcagggaatggctaatttgggagagaagagcgagatcagtggttccgtcctgctgtcatggcacgagaaggtacgcatcgcgtccggctgtgtgctgtaacgacacggatcagttgaactattttattccacagctaattgaggtagccggtgttggttgcatcgttcgagtaatgactgatcgtcgtatcgtctagctgcgggatgattctggactttcggacagatgcgtaaacacacaacccctctactctttctattttagtttcgacatgtgaatgtgcttgtactgtggtatacaaagcttataccatcccataaatctatgtccatcaacgcgtcgtccgacagcttccaaacgccaatgcaccacccgctattcagcttccaaccccgcccgatttgacgctcggcacggtgatgtcccattctccgagcgagtttcgtgacttctcggtggtcacgttccaggtaggatttctcgctcttgctccgataccgggggagacgataccgacgtatggcatgatatcgtatttcagagataactggcacgacgggatcgttctagttcgaagaacaaaggcggcgggttcagtcgtttggatcaaccgcttgagtcgggaccgaagctgagcttacttgaaacccccacgccgtactttccaaacgttcttcgccttcaagccttctattctgagtttggctgcttcaggtcgcttcctcgtgatgatcctgtcccatagcacgactgaactttcggtctttgaccgagatggatggccacgttggcaagtcagcgtatgtaaaccagattcgcgacgaattcctcatgactcactccttcgatcgtggtgttccaatccgcaacgatgctgacatacagttgcttcgtattccagtttgcgaatagcggagtcaagtctgactggacgtctagcctcatcaaggcatactccaggttggattgcgatcccgacccaggaacactggagggcggagatgagcttcgaccctgaatctgacgtgcagaaacatcactcggttctactcacacctggaacgacttgagaccgatggtccccagaggcaccgttggcagtatgtaccaggacgagacgctgatggctgccaaaagagtcaggcaaaccgaaagcgcccaagacgaggtgttctgcaagcgttgccaagcagagaacatgattgagggatatttggccgccagatcagtgaatgatgcttcgcttcttgtatacagatgccgcaagatgttgcgacagatcgctacgacacctttgatcctgcatttatggacaccgtacgtagcgatccggggtcgggagggatgttcatgtcggaagtaaatttacttccgcacctccactgagctagagcggccgaacgctcctcgacgatcgatgttatcgacttgtgacatgcaattacaggtttcggtcaactatggaccagttcagcgagctcgaccgggtcgtactagacatacatctagtatgatcgagcctcgatacaaatttcaaaaaccatgaccgttccacttaccccgccggaggctcggatccccttgccagcctcgcggatgccttcaccctcaggatcgtcctcgagagacaggctactcgtctcggatctggcaatgaggaggtctcgcatgcggtcccctctcagatcgacgtctttgcctacctcagccgactccggcacggagcaggaagtgcaaagtggaacagcgagaatggcatctcacctccggctggatactagcgcttcgtcaccagccagcgtctctatccgaggggactatcaaatgaaacggccgttcatcgtgaggagcagtacaagcacatcgaccatctacagggagggaagtagctctgtgcctccaccgatgtcctcaagacgtctggactatgaagaaatggttagacaagagcaagccagggaggagaatgagtctcaggacgatttctacaaggaacgaggtcagtagatcctagacatgacgaatcgaagaagtatcaccaatatagcttgacgacagtggtcaaattcaatcaacccgttggctctctgtccatcagtccttcgtcccgtgacttgtgtctggcctcgtaagcgcaaaatctgcacatctgcctacggcctcccaagggaaactgatacctcgtcgcattgaccccaggcgaaaaggtctatatatcgtggatgtcagatacccggaacaagtgccgcgctgcgtcccgcaaggagggatgtggcaggtcgcagagtaagcggaagccggcacgttttagactgaaagggtctaactccggcttcgtttctccatagctgtcaatggtcacctcatccggctacatcgaatctggtcctgacaacttccgctcagaaactgctcctatgggatctttgttcgacatctccttcgacgtgcctatcccgcgtgatcgaagcgcacgagagagggatcaccgatatcaactggcatgctcgggatcccaattacatggcgaccacctcgatcgacggttcagtcaagggatgggacatccgggtcaaggataacgaccgtgctgtgatgaggctggcagactggggagatgcagctactcaagtgaaatggaatcggcagcatgaccatatcttggctagcagtcatggaaatcgattatgcatctgggatacgagggtgagccggccctagaatgggaagctttcccgacgaacatcgcctgagcggagaacatacctgtatagaaaggagctgttcctatcacagcattgcaggcgcacgatgacaggatgtacggaatcgactgggacagacgatctcgacacgagattgtcacttgctcactaggtaaggctgaacgtacacgcgcatcttacactccaccagcttagcgaaccattcctcagacaaaaccatcaaatactggtcgatcgatgacatgtcaaccgaccggcgagaccgataccagcacaaagagtactttccttccctgcctgctcccgctcagccgtcgtcgaccatccgaacgaaaaatccagtatggagagcgaggaaccttccctttggtcgaggtgtcttaagtgtaccgcagagaggcgcttgtgccctcgaaatgtggggcaaagatcaagatagcgggccgatcgagagattcgaagagtacactgcgccagtcaaggaatttgtctggcgtacaagaggcgggaacgatccagaccatggttagttgcgtgaaacgaatgctcgatctccagtcgctgatcgatcacaacagaggacagagaattccagttaatcacctggtcaaaagaccgtcagctaagaatgattcccatacagcgagacctcctagccgtaagtttgacgcagatgatgccctcatatgatcatgttgctgagtcgaaatccaatttcatagagggctggctatcgaaagggtgtaccaatcgatcgtgagttacctgatagcttcgcccgacactggctgtactgatgccgtatttgagcacagtccttgtttccaggcgtaatgcacccgacgtgtcttatgctacctgggagactccgcctttgccttggctatctgccaagctacaaaaggcagaagagacagcaagcggcgcgactacagtagcagagccgtccccggtcgtagccaattttccagcgagagatggtctggaccgtattctccctttccgcacaagatcagagtcattagccccgctttttgggtctaagccgcaaatcaagctggaggacggcggtataaagcctgtcaaggcggcgatcaaaacggcggttatgacaagaggatcccttggtcgacaaggcaagaagcgtaaaaccatcgatcaattggaatggctgggaggcgttacgacggtgagtactcgcgtcagacaacgccgacggattgctcacaatcccgaggattgacagattcatcgcgacggtaaaggcgtctcatcgcttggaaattctctgccggcctcgcagcgtacctcgcgactagcttctctctcgcgcaagggatccgactccggtagtcagtcagtcgagggcattcctggaactcctggaggacctctatccttttcactccgtggcttcatggcagatagaaggggcagcactcagttggatgtcgatgaggaggaaaatcttaacatagatctggcagatgagtgagcaaaatactgtcgaacatcgttgatatggcgaagtaacgtgaccttctcgtagaatccgccatgtcaaagtgaacttcccacgggcgcgattcgagagtcaaaatgtaagcgaaacttcagaaaatccaaggcaatgcgttgtggctgaccttcagagacacatcagttggatttcaaaaagcgacagtgtgccatttatttacgggggccctggggtgagagctctcggtccgttcgcctaagggttttgttccggtttcctcggggatatccgcgaaaacccggacaggcgggatgtccgatgttcaaactcatcgaaaaaccagccatacctccagaaacgcatgacacaatgcgccgaagactgcaggagatatgcgaagaacagcgcccagctttgggtgcatgcgtttcttaccttttaggaatggaacagaagcagagtcaacctggtgaactcgagccagattcggattcagagtcagacattggatcgcccagtcagaaacacgtcctcgataagaggacctgcggtatgtgttggggaccgaatggtaagtcattcagcccatcaagcccgctaggcgcagcttatcgtggttgagcacaggagagttagtgactttcttcgcgaaggacttgaatctaggaagaaggcggaatccctcggcgccacagacgcccaccggcaagaccggcagacaagtcagtcttggcaacgggggagcaaaaggcaacgcagcccttctcaaagcgatgtccgccttgtctcgcttgagcgattccaagcacgataagcatcgtaggcgacaggcagagctggctggtttctccttcgctcgaggcatccacaaagtcagttcacggcagtcggcagacgttcggcactgctgactcgatttactgccatatagacgcaattgggagctacggatgatttgcggcatggtcaattcaaactgaataaccgcatgctggtgccacagcagaaaccaagttcggttgtgcaagtatggccccaagcggtcgctggacagccgtgcaagcgcctcgctgagctgtacaagagggatggaggcgttgttgctatcgaggcgaattgtaggatagcccaaggaatggcgcgggccgatcatgagctagtctggaagctttgtgcgaccacgttgtccgcaggacgccgatctgttctagaggcggaaggtcagaccgaaaagccaccccgcttcaaatgcaaacgggtgcagccttacccagagggatctccaacgcatatcattacgacgctggctcaaatgtcagtcaagcaatgcatccgccttcacctcgctcacgctcacattttgcgttcgtttctctgatagcgttcgccaagtcgtggcgtcgcgagacatccagctcttggccaccattttgtcgatctttatggatcaagggcccttggccgttcgtaagtttaggatcgagataacgaataccacaagtgatccgccagtggctgagatagcccctcagatcctgatgcgatcgctgggagatccagaactcgacggagaacggtcgagaccgattatttcaattcacgcgaaccatctcgatctaagagtgaagccgggtcggcccgtcacacccctcgagtgccatcgccgtctccggctgcaccatacctagccggcctttcgagcaatttttctcagttcctgcccttcagcaatagcttggtctcgactagcggctttggagatcgcgatcgcagagtctccgagtctccatcttgggtagccgatccagacacacgcccactacctgtaccgatggctcccaatcttcgcttgccaaaccgatcggcaagccctcggcgagacagcttccggcaacaattgtttggtaaacccttggggacttcgcacgaatcacagtacgcggcctctatgcgcagcgcgacagatattggatcattggattcccaatccattcagaacagcaggatgaatcgtgtctcctttggctccttcgcaccggcgcaagattcaatcaccaagctcgattctgaaatcagttatcattccgcttcgtctaaacccgaaccctacatcaaaagctggcggactatggtggaactgcagaccaacgatgcttcgcatcagtaggtgaacaccttgacggtcgtacaaatcgcgaactgacaatcttcgtcttgacgcagtgcctggtccccagtgtggcgacaactatgtgacgagacagccgtaaaggctgcgtacggcgatttattgcttcgatggggcctgtatatggagcgcagcgagttgctactgaaatcaaattcgcaatacccggcaggctatgtcgagagcgacacggctcacggctcattgagtaaggaattgttcagtgcgccagatatctcgcgtcgctgattagtttccatttgcgatagccgcgctctcgctctgcagtcgatgcggctatgaaatccgtgatgatgtcgatcaagcttgttcatgtggacgacagaaggctccggcttgtgctttttgcaggttgcccgttaccggtaaggatcgccctctcgatctatcgcggatgtgcacgctgacacattctcattaggtatcgctctagtgtgtaccgtgtgtctacacattcagcacgccagttgcgcaaaaatcgcttccacaatcagcgtgggtcagtcgacggcgacagataccacctgtccaatggggtgtgactgcgtctgcaagctaggaggcttcaacgggatgttagaaacagacgacactggtgtccaagggaatgaggcagtggacgccacgccaacggctccattgaagcgattagaagaccccgaggagcctgatcaacccggcgatcatatcggccccatctcgagcactgagggagaggccacagctacggatataactcagaacaaagcaccatcgagtcggacgctagggatgttcgccaaagcccaaatgcggaatctaggggaattcagtcattacttttcgcatgccaactgattctatatgtgtgcacttcgcgtgctatgcaagtgatatcgatttacaatctgtaacgcagaagcgtccgaacctcgtaataaagcaatacgttaccagcttatctgcgctccttgacgaagaactgcaatgccaaatatgaagcgatcaaggagactccgaacacaatgcacagaagtgagatatcgggccaccaaaatgcttgcgcatggaaaccaaacgaggacaagatggttgccgaaggtacttgtatatcgagaccgaactgatatcccgataccatgagcgcatgtccttgctattggccgatttagaaagatgttctcaccttgtgctctatgagctgtagataccgcagttcgttgacgagaagagcctcgtatgctgcatggaagaatgaagtcgtttgcatccagcgcagccccgtcggaacacggtcgtagttcatgaggagaccggcaaataacaggctatttaaacggcaaagggttggcgtttgcttgtgtgaatttgccagacccgactcacttgtatagcatcactaaactgcccataagattggcgacgccggtatccgctatggcgatgctgaggaagagcacgacgcttgacgcggtcaggttgaagaggaccagcgttaagatgaacttccagaaacacgaaacctctgggttgagtcccgccaatccgtagacaattgacccaagcacaaaggggggaatcactcgaagagggagcgtgtcgaatatcaccttggatacgaaataaatgaacggagagtagtatccatttgccctgtaggaacgaagctttgtaagtccaattctcaacaatgaaaaagaaggaacgacttgcctctcgcgcatgaacaggatcctttcactagcgaagactcccactgaagacaggcaggagaagccaaatagcgagaggatgaagaagaatagaccaagcctgttttggaagccgggaatatcgttcgtgacgtggtaaaagaagaatccacagaaaactgtgaatagctaggggtctcagccgtgatgtcgcggcagacaactgcgaattcgggaatccttacgagcgaccacgatcgcaacgatataatgagcggccattaagagagggtttctgagtcgccaaaagtttgtctttagggatcggcctggacgtagaaccaccgtctgttctcatggctcaccggtaaagattcttgaaagccctgctgctcaatgtgacaaattgtgtgctccacgaagctctcttatatgtacggaacggtgtcgtctcggaggttacctcacgaagcccgtcgagtcccactccatgatgcaaacgatgaagctccgcttctgtaattttggcttgatcgcttgccttgtatccagcgaccagctgagcgagcttttgtggcatagcgggaatgatcacggtttcgtcctgagtacttgacttaagagactgtgtaaaatcgaatgccttattcttgaatttggtaacgattgaggagctcccgctaccattcgagtggtcggcatgatcgatcgcaccgctggcagaggcaagagatccgatttctgcatcttcggctggcactctgtcggacttgtggtcgcccgctgccttggtggtgacatcgactgtaggtgacgaaacgatcaggtccgtattgttgctcatgcgccacaggagcgtactcactcaagtaatcggcgatgttataacccgcagggcattcatatccgagcgcagcaaagtgctcctggcagcgtttgaaatctcccgagtaaaccacacggccttttgagagaagcatcatcctgtcaaacatggatgtgatgttgctttgaggctgatgaatcgtgaacacaacagtccggttgtattgcttagccaaggtggctaatgagtccacaacattgtaggcgttgtaagagtccaggcctatttgacaattcgatcagctcccgtcctcgcatcaatcgtgattggaattgttttcctgctcaccactagtgggctcatccaagaacaagatagacgggctggtgacgagttcacaggcgatggaaacgcgcctcttttctcctccagaaatcgaacgcttgcctgattcaccgatacgagagtccttgattccgaggatgcccagctcctgcatagtctccagggtacggaatttcttggcttcgatactcatgtccttgggtagcctcaaaatggcagaataaaggaccgtttcgtagactgtcagggttggcatcaaggtgtcttcctggtcgacgaatccgactattcttttgtacagatcgttatcgtcgatgctcctgccattgatgtaaagctggcctccgacacgaccgcgcttgtccttgcgcgcaagaatatccaagaaagtggactttcccgctccggaagatccaagaatagccatgagttgacccggtgccacggaaccattgacgtccgtcaagacggccttgttgttgatggcgtaggagacattttcgaagtggagagtagccggaatgtgatctgccatcaacttggacgcttcgtcggagggtaactgaacgtcaccgaagcctcgggggtgcttctttgaacggccaaaataccaaagcactagtgaaggacccaacgctgttagtcttccgctttctggacgaccagaaacggaaactcacggaaagccgccagcaaaaatacgagggcagcgctagcagcgctcaggccaacccagactttgttgtctggagcttcgggagcctggaaaaggaacatcggtcagtccggtagggcgtcgtaacgatactagcagactaatgactagcttacctcgtagccaggcacctgagtgtagtgcatgcattcaccgctatcgcagttgagcgtgatcgactcgtctccgaagatgtcgttgatcaattgatccatagccagttcactgaatgaacatcctttaccggtctcgcattggaatgtagcgggtcccttcacttcctcgacgaggaagtcgtcaatatctggtgattccgagcatcataatcagtcgtcaggaaccatctgcacgcgcgaagacccattttaatactcactgacgctgccgtcttccccacacaggaaacggtcggccacacatgcgcattcaatggtcttgcattcatagttggtcttgttggtatcttcaaggcacaggaaggttatcgtcaacatggctcacgagtacgatcttgcaccccacactcactggcgctacccctgccctcccatccgcaaccgtccagcttgcagtaaaagctttcgaccgaatcgacccagaattggaaagaacatgttccatcgacgtcgtccttggcattgttcgcgtcaggttctacatcactgccgaagggggcaaagagcggatgtatatagtccattgacgaggactccaggctcatgttgcccgtcggtcctttcttgcatgagaatgtcacctgaggtttcttctggtcagggatggtgtcgatgatcttgcggtctgtgcagcgataaacctcgtccgatcagcaaggttctttttggcggaccaagatctgcaggggctcacttgtgacgtcacacatctggtaattctgttgcacagcgaggccgcctttgtaacagaccatgttggattcgccttcttcctcgtcatttcgtcgatccatctcatcaccaggaaaacgaggctggaatgcggcgcaagcctggtcattttcacagactgacgagcgaagagtagcggaacagaggatcagaaggcggtcgagcggatcgagaagaactgtcgatttcaaagctcaccattacagttgataccgccccatccgtcctgacagtcacacagttctccctcgggtcgaggatacctcgcgtcagcatccgcgagagacccgcagactgacgaaaagaacagccaagagtgatgagtaaaactcttcatctggtcgtgtgtttccagagtctcatcttacgaggcgtgagacaatcgatacctccccatccgtcggggcaatggcattgaccgtcgtatgcgttacattcgccgaactataaggatgtagcggatcaattcaatacctgaggctggtagtataacgagcgtggacgtacttgtgcgcaattgaatgcgggtaataggcagttgaagcacggtgggcattcgtcggctaagcccgagagagggatcgatgagcatgactaggcgattcaatcgctcgccgagaacgtacgcctctttgtattgggaggaatcaactatcagaatcgagagccaagcaagtcctatattaggtttcgtcgtcccgtcgtttcgatcctgtcattatcgacttgcaaacgagcgacttaccgacgagtttgtccgcatgagggactgagttggttgaccttgcttgatagaagcctttcgagcatacaagcctggtttggctgattctttgccagcacgagccccaccgatcagagccaagagacctaatgcgatcgattcgacacgcatattattgatcgatcgccacaagggtgatgtcgtgggtatgggtcgatcgggtatgtccggtctcgccgaaagggttcgtatcgcagggtaacgatcggcctttatagcggtactgcttttattctggtggtgtaatagactgaacgacgactcgagctggcttttgtgtggtaggaagcttgatgtgtgttcctatgagaggcgacaacgttgcgacgaccatcgtggatcgtgaatgaacgagtccaaaggcagacaacgctgacgctgacgattgaccgcatcggacgcgttgatccgtcgagtcgaggcgtcaaggtcacggacatgatcaacaggtgacgatgtccgagcgagatcaccattaccgattaggatggaactgatgtacagcaactggctgatatcaatgatatccacgatctgagcgcataaagacccccagtacatgctcgtatatgagttctgtctctctccgtgtctaaatccatgatattgtacaaacaatgctagtatacctcccgtcacgactctgacgcaatctccagataactctcggggacgagcccttccatgagctcgtccgtgctggacgcttctcggagtcgcacggcaatgacccaaccgacacctcccccacgacccttgacgtcgagcatgtcaccttcctcgacgttcatctcgtgtccacccagcccttcgaaagcgtacgccacccggtatcgcccgacaggttccgggccaaactcttcctctccgtcgagttcgccttctcccgaaacgtcgtcttcccatacgtcgtggtgatgtcgttccccgttttcgtcccgcgtgatcccgatgaggggggatttgccttcttcggcaaacgacgagctgggcgtcaggtcgctgctcaggtcgacgtccgtatcgacctttgtcaggttacccagacccaacccgccactctggcccgaatctcgatttttacccccccaacccccgaaaaaccctgcccaacctccaaacgagctctttctcctattcccggatcctccacccctagatcccgatcggcccagaccgctagggagccccgaggagaagaacaagtctcccgcttcggaagacgctcgactcgcaggttgagagttgctcgaacccggatagacgccgacgaaccgatcgtcctggaccgtgtatgcgaaatccttgatgacgatcgtgccggggcttcggggtcgaggggatgacccacgcaagctagccgcgggtaacaaggaccccttgatcgtaccccggttcagattttcgttgcttcccgaaccggaagaagagggcgggatggtatccgattcgtgacccggggcggggatcaaggtggatggtggacgggctcgcaatccgcccgaaaacgactgtcgccatccacctcccgcggcagaggaccgtctcgacacgttggcaccttgtctcccagacgcggaggatccagattggttcgagagcgaacgggtcctacccgataatccagcgttcaaggcatgatggctccccaagcttggagctcgagaaggtggacgagatccagcgggcgaaccggttgccgagggtgaacgtggagcgatccgaggagagtggtagatgttcggatgtacggaagaagcgttcgaggttcgtctcgacgtcgacggtcttgtggtggccggcccgccaaagggatgattttgataaagagcggtcgaagaggacgctgtggggtaagggggagctaagccgggggaaggaaaggtatccttgatcgagtcgggactgtcgacgatttcaatgccgtgatcgggatgattgatggggaacggcacctcttgttgctcgaccgacgttctcggggataatggggttcgagggggttcatccagttggacgacctcgccctcgggaacgtccatcaaatgacgcggtgcggcgatgggagcggtgctgctagaggtggtgatgggctgagattgagaaggtagaggaagttggtgtatacttttgatcgtagagtcctttgtttgacctgtagatattgtcgactcgcggtctagagacaccccggtgtccgagagagcgaccatgatcaagtgagggcgtatccgtcagaagaaggcgtgatcaaagggaatgaccgcccccggttgggtatgatacgctctcaaggtttcgttccaagggactttggatcgtcctcgcccgatgggacgatggatcgatacgagctcgatgtggcgaagggagataaaggacgacgatgatgacgacgagagtcgtttgatcaaagatccgagagatggatcgtgacggtgatctcgtttttgtgggggaaagagaatagggtatgggcggtggtatgggtgctcctccacctccgccaccaccaccgcctccttcgggtggtcgggcaccgatcgcaccgcctcttcccactggcggtggagacacaagatcggccctcctcgcaagtattcaaggcaagggtgttcacgcgctcaaaaaggtttgtctctcgtagcggacaatgtgagaagagacagtgatagtataagagctgattcaaccacttctcatcgtgcagaccggaggcgccgattcacctgcgccccaggctagcagcagtcgagcaggaaccggtgctgcagctgcacttggtggagccgcggtcggaggtgccgctggagccgcgatggctgctgatgacggtaagctcgtgctcgtttcgaaattcgtgctgcgaaacaatcctaacgttcagcccacccacaggtccagatcttgcatcttccctcgctgccgctctggcgcagcgtaagggagatatgggtgatagtgacgaggaggagagtgacgatgagtgggactaagttagctagtatgcttaaagtggtcccacaggcgttgtggtagtctggtcgttattcaatgatacaatgttgcgatatggttgtcggcaatcactctcataagtcgccctttttcaggtgacgcagcacgacttcgccgagactgccggatcttgcgatcgcgctcgcgaaggtagggccaaccgatgtcttgagcagagactcgtccgtatccacggcaatctggtcttgctcggccttgtcctggattttgttcaagatcatctgtgcagcgataatggtttagcatatagattggactttcaccaaagtcgatcgagagagactcacaatcgcagtatcaatcacgccccctcgttctacctcggacaacttgtccacttcgcctcccagcacccgtaatcgctcggcgccgtttcccaacaaggcgtgtgtgactgcgttcttgcccattgcacccaacccaagcagagccccttcgtagcgtccagcagccgagatcatgtcctgtttgcccaaaaggccagtgggtactggtgctttaacgctggcgggcgatgccagagcgcgagtcaaggtgcccgcgacgcctgataaccgaagacgagagtacaatgttaagtctcgagatactggttattcatactgcgaacatgagacccttctactcacgaggcatgagagtttcgtaatctgctgagaatgacgagatgagggagcccagcagatctgccgccttggtgcggaccgcttttgcagagatcttttctttggcgctgttgttgcttctgccgagcgggatagaaaggaggatcgagaggattggaggtagcaattgatgcagctggaagtgtagacgagaacgagtcagatcgcgagctgcccgtatcaaagtcacgggtgtggcagtacgcacatatggttcgatgaacagcgccgggttcttgaccagagctacgagcgcatccacgagataacccaactcgacagtcgaacgaccttcctttcctggcgagaccgacgagctgatgttttcgctcaaccatcgaatcaagtaaggaaccaggtcggacaatgaaggatccaatgacaacgtcgcaagcgatgcactgcggatcctctctgattccgagagcgtgacttggttttggcctcctgctgggggaggtaatcgtgaaggtccggcggagctgggaggggcttcggtactcggtgtcgagggtacggtagtgatcgatgcgagagatggatccggcacgagaccctccgtgagtcgtcggaaaaggagctggaattcttgtgacagatgcgacttggccaatgtctctgctccagtggccgtcggccgtgtcgttgcttgcttcgtggcgttctgtgtagcattcaacgagttgtctagcgagcggagattcgatcagtgatggtggtctgtgtattccctgtccgggccaggtgctcactaatttgcgagataggattctccttgatcaacggttggaccccctccacggccagccaatgcgatttccacctgaagccagcctctcctcctacggtcgctcttgctggtgtcgtgtgcgcattcttcaagaacgtggccaggtcaatctcctcatctttcaggtaatacagctgaggatttgaagcggtgatggccgtctcgggagggtacacgggctggaaagctggtttgtaaagcggtttgggcggatgaaggattggctgcgaccacaaaagatggtcttggtaagtccgagagactgcttgcttgcatcccatggatccttacctggacgttgagcgcctgtagtgcatagtcgatgtcctccggcatcatggtcgtcctctttgcgtgccgcatgaacttgtgagcttcttggatgatcaggttgagcctgtactcgacatctccagcgatagcctgacatgtctcttcagagattttatcgatggctagtgattcggctacatcctgtaaaaagacgagtcgggcttgagcttggcatctcgtcgatgatcaagaagacgcaggtctgaccttgacagaagtcgtcggaaagatgccgactgcaggctgatacgaccccgacatgtcgttcgaaacacctcaagaatcagcacgttactcggtcttaggtttggtcttgaacgaccgttgctagatgtatttaagtaccaaatgagttgcttcaggtatttcctttgatttgggccttgcaggtaggtcgaccgaagtcatcccttcctcgggctcgcgccgaagcttgactgggcggttcggtcgatctcccagcgtcacctattcatcatcatatcatcgttcatcgtcatgtatccgttaatcgaactatcacacacaccatcaagatacacttttgactagcccccagtgaagatatatccaaagtctttcgcttgcttgtcgatctgctgcagaagcccgatttcccagcacaacctcgagcttcgccgactggcaccaccacaactcgcaagtcgaagcccggctggtatccctttattgaaactaatcgcattacattgtgcgccgctcgccccagggaacagatcgttttcatccactgtcatgatcaccgataccaccctgacaaatctcgccaacggtctcggcgtcaccgccatgctgctggtggtcgcataccactttatcgcggtcaatgcggaccgtgcgcaagattagagctggaggggggacccgaatttcgcgccagaaggaaacactatagtaagaaggttcctcggcttatagcccacgatggatctctgatcgtccaccgttgcttgcgtggcaccattaggaggcacagtcaccggatttgatatgggccactagacaaagggcgtcggggaaatgtccaacttcgctcatcgaccacgtctattccaccccgataaagcattcaatatgcgttgtatagatctgatacaaatatcctgcaagtcgcacgaattcgactcgctacaactaatggacgcctgcctatacaacctggtgatcgatccgctctgcttccccatgtgcactctggcctcaagcgcccgtgtgagagccttgtagtgatcgtccggcggcccgcgatcgctgcatgaccgtcatccagaattgtaatagcgctcttcgacctcctcttccccttccacggattcccgctaccacggcgacgaaaaggctcatcaagacgagcacaaagctggcatcgatcaccgtccttcggaccgtgcccagtaatcgcatgacgacacgagtgacgataccactctgctgcccggagccttctccgagatgttgcaagtgctggtgatacggatcccaccggtgttcgaccgcgcttgacgaaccgacgcccagcatccggagcaagaccgtccacggatcggaaggttgacgcaggaccatcgtctgcgcatattcgatcgagttgatcctctcgtgtagagctgtcagtgaggtctggatgcgttcgaggacgacaggaagttcggccgtggtcgtggggggaagctgagcgggcgccgcttgacccgctagcgtgctgggctgtacgaatcgagactgtacgggaggctgcatccgtgtggctaatccggtatagggcgaggcaaagacttgtggagagcgccagtgatctacgggtcctggtgaaaaaggtggccgcaggtgactttgaggtgtcgcgcgcaacgagtggatgtgatcgtaataatgctgatgtgccggacggtatggatgaaaggaagtttctgatattggccgttgcagttgagaaggtcccggaccggggtgcgagtttccaggcgctgtgcgagaagcaggtacgccttcccagggagaggcgatgggccattccgtgtgacccaggtcagtatgtgctcctggcgtgatcccgccggcttgaacgttcgaataccctgctacctgttgcgtcgcgcttgaattttggcccagtccgtcgttccttccgcccgttgttcgagccctcttctgactctgcacgatcgaaggtgctctcgacggtttgtgggactgcgcgtcaccgccaagcgagatgctggaatcgcttcctcttcgcgtcagatatgcgggcgagtctgcagaccaatgacgtccaactgtttgcccttgatgagcccgtcgaggatcgtaccgctggtcaggcgattccagtacggggggtagacccaatgcgtgaacaggcccaggagggcagacggccaaaaaaggttcccgagcaggctcgtcgcccggttgggtgagctgttgatccgtagcgttcggtctcccagcttggacgtattcattgccgacctccgactggcgcgatgacatgaaagagtcgttcgatgaagagcttgcgtccgctgtgatcatcgagcatctatccgtcaatcggtcatactcagatgcgactcccaaggctacccacaattccttctcgatttccgtctcctctcgggcctggcaggatttccaagaccagccagctcgtctatatgctgtttggtcatcgtttcattcggatatctatgcaagagctgtgctgggcagtttgtcaatctctggcgcagaagggatcaacaacgtctgagactcactttgagcaagacatcgacgtaggcagcctgccagattgtggtgatgtcggtgagctcaggcacgatatcgagccgagctttacgtggctcaccatcgcatcctgtttggaagatcctttctgcttgttccatgcatccctgcgtccacgctctggttcagcaactcgatcggcaatgtcgccgcatgacctcggtatccaatatgcgtctcaggtcttagtgtactgaccatttggctcgtcctaggacgtcgaacaaccccgggcgagcacttggtcgatctccctcggtggcttgcttgaacaggctgcgacggcaataaaggcgatcaggcgtttggcactgggatggcttttggatgacgtctcgaacctgtagatggctagcttgtcgtcgtacgacgattgtataggtccgttctttggcagactgttggcgattgaggaaattctgaatgataagccttggtccttgccgcttcactcgcgacaatatcgaccgacctctggacgatatcgaccgctcgaaagaattgactgtcggagatgagatcggctttgcgtcagaccggcgatgcgcccggatgcccgttgcgaggcgattagcgccgccttgaacgtaccgtgctatggcatcgtcttccatggttcaagagctggtgagatggcagtctgctggactgaaacggatgcggttgaaatcgacaaatgcctgtcgagatagcttgatctcgaccgaaccctcaggtcgaccggctgaacgcgaaagggggagattgcccgaacgtccgtcccgatcagcactacactaccacaagaaatcagaaaaacatgtcaggttcacaactctcttgatctcgctcgcgatatccacaccaaagttgtgacgtctttgaactcggattgaacacggtcatactgtcccggatatcagcaactacgacggacaaaggtatcagctcgcatacaagatgggtaaaagaaagtcttcaagtgtaagcctcgcccgagctgcttcgcgctgcctgtgggtgtcgtctcgctgatttcacattatatctgcgtgtcaacgatctcgtcgtgtacagaaaccgatggccaagaaaggtaagattcagctctaagtatatgcatgcatacctgtactgattgaatctcgtcctgtgatgcaggcccgggcaagatcggttagttcgaaaaaggcatacgacaaacactgagacttgcagactgaacctgcgttttcatgtcggacgggtgtgactccaggccaatcttttgactgtgtatattgcgcgacggacaagtctgtcaacatgaccttgtgagctttccgacactctgagcttgagcgatcgctagacatcgccagagctgatcatcggatccggtaatgcaaaagctcgaaaccaaacaaccggtggcaccttctttgtggagcttgtgacgctacctgggacatggactgtggcccgggtgagtctcgttctgtgcatctcatggatgatatcggtaagatcgcctgttgaagaagggattgcgtttgttcaggtcaaaaattggaacccattgatgtcgtgagtctggatcggaggcacgccgtcttgttctgtgcgaggtggcttatattcacgaatccgaaattatccaatcagtactatgagtgagcggcgagaccggtgctgaacagatcggcctcccgggatgttggctaatcatgacacaactcattccgcttcgcctgccagatggattgatgccgcagaggaagtcaggcaggaagacgagaagcaagtcttccggccgtgtcgtccggtctctacgatatttaacctcttgatcttctttgtagagctaggcagtcccaggcttcgcgacggacaacgacccagaaaaagagctctgccgcccctaggaaccggtcggcctctccagaccgaaacaggtctcagcgagatcgatcgcgcagcgaggagagtgaacgggcgggagcgtccgccaagcgatcacagaacgattatgacgacgaggacgccgagggtgaagaggaagcggactactagtttccgggagaagctgtctctcgccgccgggcgacacgaatatgagtgtatatctcgctttgtacacacacacacgcatgcgaacacagatcaggcttggctggtcggatcttcaatgccaagatcatgcagactgctgcactcgtattaatttcattgtttaagcaacggtctgttgtgttatgagcctgcaggcacctcgaccttgaattccgtgcagtgacaaggtgacgaacgagtgatccggaaacgaatttgtttccgaagcggggtcgtcaccggtccgagcgagaagcggggactcgacagcccgctcgtgagagaatagtcgaatgcatgatctaatgacgctcgaccatcctcattgacgatatacctatagccacaactggtcaaccgggaagcgtcttcacactgattccccgaggatattgctggatcccgcaatcggagaaaccacgcggtcgatgctacaccgaagagcaaggttcggcgttcgacacgaaattcggtaaggggtccacgcagcgagtgccccgccttgacgacctgtagctcgaacagcgggtgccatctggtacacctggagccaccgggtccggacaaactagaggacgtgctctcgagatatggataccgacagtcccaccggatatgaccgtctgaagagcgaatttgcttcgcaggatagggctggcgagacatttacagatgttgcggggcaattggtgagtaacggctgagacgatggcaagcggaatatctccaggttccgagccatgtcagctgatccggatacggctccgcaatacagggcaagttgccgaaagctgtcatcaatgctggtgtctataaacacaagtgcggggtaagtctatcgaagcttgtcgtatcatcgatacaccgttgacaggctgactcaacgctcgactacttcgcgcttttttcaaacagttctgtgattccactttccaagtcagctttcgcggttcggccatgcggaattcatcctactaaattcggatcgcacatcatagaaaacggaacacttgcggagacacgaacggagccatacgaaggaacgaccgttcgagtgcccagaatgtggcaagaagttcacgcgcgccgatagtctagtgcgacattcccggctccatgagctcaatggtggatcctcggtcgacgatctggatcaacaggccagcgggtccgtcgatagacctcggggtctaacgaggctttcggtcggttcgagggaggatggcgaactcgaccgcaagagtagcctgaagctatccgaggatgttcgtgcgtggtcggggtcgagtcattccgtccggctgccagaacaggatggttctcgaaatgaacccgcgtccaaacgtagaaaaccgaacgatgactcctcggtatcgcagacaccgcaggggctctctccgtacgattctgaagccacacatatgggtgcgaggatgccaggtagcagctcggtcgctccaagactacgcaatccgccccagacgctggatccgaaccccacgacagtgctgcgagcggcggctggcctggacgcgatgcccctgtattccgctcagggagccttcgatgcgcccaatgccaactactcgcatgcctatggaccgaacggtactatcgatcggttgaccaacccagatccgaacacacgtcaaatctctgccccaacttcggccttgatgtttgcgaggaacctcgactcgcatcttaccggtcacttgatcgatcacatcagaaatccccaggacgactatgccacttcatatcgtacccctcagtcggacggggactcgcacactacgccgacgtccatgagagaccctctggttcatctgaatgatcatcatgctcacatcggagaactgcgagaccattcgcagggacccactctgggtctacatgtggagacgccctatacggggggtcagccatatactgaagcgatgcctctagatcctatggtggtcgagaatcaaggaaacatgcttggcttgccaatgacaggcgacgtaggcaacggcctcgacgttgatagcagtttcaatttcgagacaaacgcgtatggtctgccgatgggattcggcatcgaggaaacttccgacttggatctgttgcagtttctggcgtcggatacgtccatcgcattcgctcatacgttagtatacggcgaccttaatcccggccagatccaatcacgttcaaattgctgactatcacatcatccgtgtccatcgcagattgataccggagtatacgacgtatacgagacataattcccccggcccctccaaccccatcgtccggcgtacctcaccattcagcccgatgcgcttccctgccgacccgatacttgatccttcgatctcgtcgctgtcatccataggaggcaacgatgctatgcaagcagattatccccaacatgtctcgctttcgcccaagatggctgcactctggaaaaatttgatgacgcagggcgctgcggaacctcaggaacagctacgagtgccaacagatactacaaggggcaattcgctcagcgctactcctcctgctacgggtcggacgacacagttgcacggaatccaaccaagcggtagggacgagggaggaccaggtgcaagcgtcgccagcgatacccacctgaatagcgaccgaggccgacctcaagacgctattacagaagccaagcacctcatctctgatttggcaagtattgtgatctacagatgcattttcgaatcacccagacttacacttcgacatagtctttccatttgtcggcgtccacctctcccctgtcctcggcattcttggacaaaggattgaagctcttctttacacgattcttgcctaccttccaggtaatccatcaaccgacatggtcattgaaatcagcatcagcatcgttggtgataaatttgatagctctcgggaccttatacatgaccgaggatggggatcgagcaaaggtgagcatgcgccttggtagcttgcacttcgccttgatctgaacctcgaagaccatctggcctcaagggcgaatcgctctggcggctggtttataaaggatgctgcatttcagtgagataccgtcatcaagcgacttcaaagcagagttctgatgatcctcgtaaaccatcagtgggagcgtctcatagagctgcgtgctgggccgagtgatcctacacgagggaccacgctctgccagacgattctcctcggacagatatatgctgcattggctgaggtgcgtattggtgccctcattgtggtaatcaccagcttgggtctgacgagaataccgaaataaagcgcaacggcatgagagcctctccatacacatttcagggcttcggtttgcgaatcgctcggtcagtacaggaactcatatatatgacatgcacaaacaccgcgtgaaggcttactttactgtacaatggtatttgacagattggctgggatcttccgcatacctaaggccgcatccgacgactttctgccaaataacggagactgttcgccgatcgaattggagaacgcatggcgttcatgggcatcttatgaatctcagcttcgcgccgtgctcggcctatacattgtcgaagggcaattcgtgcaactttaccgagtcccgccaacatcctcacatctgtcaaacccctttgtcagcgcttgcgatgatcagctgttcaacgcaccgaacgctcgagcctggaaggccattctactcaatcgacagcaagaccaggaacggcggcgcgaaaacaccttctccgctatctaccgccacctcttcaacgaacagtacccgaatgctcggttcgaactcggcctcgatctttcttcaatttccaagaacgtcctcctcacaggcctacataccgtgatcgcacacctgcgggaaagcaaagctcaaggtttgctggacgatcatcgttcaccgatcaatctccatcttggcttcaaacgcctctacggagtcctgctcagcaacccgcaaaattcctcaatggaagcgagtagtctgcgcatgggttggcactctgcttacatagagctgttgctggtcgaggcgctgtctcctcaggatcttttgatgtctgcgaatattcctcttggaatgcctgacatctgcccagttgcggacgagaagatgcgatacaccaggacagctcttggtcggcgcatcttggtacatgccaatgcaattcgcttgaccgccatgaatttgcctttttcgacgatgcggttcccctcggccttcgtgtcagcttacatctaccgcgcaggattggcgctgctggcctacgtcctgggcaaggcaaacgaggccttcaacgcgaacgcggaggctttcgagctgtcgacgcagatggactttgacagcatggacatcaacaatcatccggccatgtcctcgatggcccataacgcatacgaatacacatctgatagcgctgccaggcgcttcatcaccgagggcggtcccgtcacgctaaaccacaacccgctgcagctcgacgatattgcgtgcttcgtgagctggctccggcctttcggagaggtctttggtgtagccaatactatggccgacgatctagagtcgcgcatacagggcgctgcctgatcggaaatacccctgcatcttgcattttgtacacaacgcaaaccgtatagcaatcttcaatacgattatccgtgaaatgtgacactcctatgagcgtttgagtgctgtggtgggatgcatcgcaggtggcgagcgtctcgtgcggtcctgtgttagaccttagcgctgcgtgttgcacgttgaggccctagtcatcatcgagatcgtccgatactgtcacgattggctccagccggcccaagtggaattacagcttgatctgactagcgatctgagctgccaacatcgttgccgcctggtgatgctattcagagaggcatcacatagaatgcaaaggcttttccaggattcaacatgagcgcaaagacgtgctactctcatagagaacgtaaccaggtcgagtcgagacacaccgcattgtcgggatcggaaggcctacaccagtatctgtctggcaatacttgtactctattgcccgatgacaacgtattgagggaagcctcgccttggctattcggtccggtcgtactcacacagcaagtttctgtcttgggtgggtgaaggctgatcactgacgctcagccgaacggatcaatatatctgatacaagcatcgtgctcatcaattgacaaacagtgcgaccgcacgtcggtcgagggtaccaagatgaaacgctcgcgcgaaagggcaggccaacgcgtaaaatgctgatcattagcacagcaaaaagggcaaaaagatatacaatagcccggaatcgaaccgagtgctagccgatggcaacggctaatgttaccactacaccactattgtgttagatggaagtgagtcaccagcatattatataacataaccttcgtggaacacttcttgccgcattcacgtcgagctcgagcggtctcatgcgcgcctccccggctctcctcgagcaacgagttgaatctgctttcgtcatgtatcttcttgtcatgctgcatttcattacatttgttcattgcatctgtgaagggtgccccgttgtcccatcaccatttgcccagctcgaacccatcctccttgccacccgcacctccagcgttacgctccttttccatcaacatttcaaactctcgcctttcctgggccctttccttgtcccgctcctctaccgcaccatccagtccgtaaatctctcctcgactcccaaggtcacccttcttggacccgagggtatcaatcttgatgtcgagatctcgcgaggagaggttgctgggtcgaccgaatccctcacgggcactaggtgaagctgaagagtcggacatgggagcgtttgctcctgagctattggcgaaaggctttcgtccgggtcgggctgatgggtccgcaggccgatcgaatgatccgacggccggtgcttctccagctctgatcttgtcccaggtagagctcgtcgcttgtccgatcgctggtggcatgcagatagtcagtaccagatacgcaattgatcgtccagagcttcaaggtgactcacgtccgctctggccctgaccgtactgtcgctccctctcatattcttgtcttttctcatccacctcggggtcgaaagcgcttcctgacttctggtcgtaattcgtcatcgagactccctgcagatcgtcttccattcgtgaccccgagccactcgagctgacgggcccgtcgtagatgctgccaggagatgcattcgccggatcccgaggatttcgtgagatgcctgttcgtcgttgttcttccgccatccgcttcgattgcaccatgatatcttcgaaaaccttcattttcctgaatatgccgatcgaggtgaaacatgagcacctctcgaaattgcactagatctatcaggcgtcgtctctcacctctgactatccgccatgtgattgttgacctcgagagccgcagctgctcctccgatggtaaatccgaggaaacttccggtcgaaccgacaaaccaagccgcggccaaccggacgggaagtgagatgggaggctttcgtcgtctcatgctgtaccaaactgggataccagcggcggtccccagagcggccgagacgatcatccatcgatacccctttttcaggatatcgacgtcatgttgactgatctcgcctcttcgaattctctcttgaacaagcgcttgtgtcgaagggagatccaacggacctccgggaatcatcgagccgctcatgatagggtataggaagaggtgaggttgtaggtagtgaacggtggtgttgtatgtaatcgagtcaagcaaaacgcagcaaggtgatgttgctgagagaagacgttgcgattgccaatggctattcacaggtactgatcgggtgaggaactgtcaactgtggtactgtatacgatatgtatctgttacgatcgatagtattgtacgggaagatgtcgtttgaatacgagtctatcctcatcgccagatcctgctcggtctgggtcgggtgacgtatcgatcgatcgatggagaaccggctagttagccagggcaatcaagcgcaaaaaggaggagatatgccgtaatcgacaaacgcgcttcttgtgagcacacgtccagaaatgacgatatcatccaaatttcattcatagaccattgccaccatacgatggaaggacacgcacgcacgcacacacaactaacaacctagaagaaactatcctattacaaccgagaaggagacccgagcaagacaccctacaacccttcagaagcgaaactcgagttgcgcgagacgcaaagagaaacacgaagaggagcggggatgatcgcgtgctattatgtcataatgtggggggagggggaagggcgggatgccgagtacttttctgtttctagccgctgcggcgtatctactggtctccgagaagacctgaagaaaagcaacggtatggaagaacacgatcagtcgatgctcaaaatccgctgggtttgcgagaaaaccactcaccagcaatacaggcggtggagagggtggcgatgataccagtgaccaaagcccgaggagccaaacgaacaatgtcgaccattcggttgggcgccaaagcggccagaataccgatcgagataccacccgaggcgaggttaccgaatccacagagggcgtacgaggcgatgagttgagcacgaccactgatccagttggggtcggctgcgacctgggtggaaagcgattggaacgcgacgaattcttaaagacgcgcgaggcacttgtcagtaactcccgcgatgggcggcgactgacccaactgagactcaccgttagcaatgatcttggtggcgatcaacttggagacctggaggacgtcgccagggggaactcccaacatgaaggtcaaggggtacaagatgtaaccgaagatgagctcgagggagagcgagtcgggaccgcttcgatcgattccccagaattgaccgatccaagccaagagaccgttgaaagcgtaaagagccgagacgacacacaacacgttggcaaagatcaatccggcgactcggagacccaaccaggcaccgttggagaacgagtgcaacaggttgtagctgtcatcctcgtcgtcacccttggtgatctcgatgtttccaaacgtcttgggcgtttcggtctcgggcacggcgatcttggagagggcgatggcggcagggatcgacatcaacgacgaggtcaagagatccttggcagggattccaagctggacgtaggcgataaagacactaccggcgatggtggcgaaaccagaggtcaaggcctgatgcaactcggaggcggtcatgttcttgacatggggcttgactggatttgcgaatcgaaacagtcagttcaacagttcgcgctagaccccaggatgacagctcaaactcacccaagatacagttttcaccctgaccgatgaaaggcgaggcggcggcgacgatagactcggctcccgaaagaccgaacgacttggcaaagacccaaccaaacttcttgaggacccacgacatgactccactgtagtagagagcggtggcaaaggcgacgaagaagatgatactggacaaggtgttggtagcaaagtcacctccgtcgatgatgctcctccagaaaaaggtacctcctccgagagaaccggctcgcaaaaagtcggcacagagcgtagcaacccaggtgaaaagatcgagaccggcgtcggtcttgaagacgaacagaccgaggatcatctggaaaccgagaccgagaatggtggttcgcgccttgacggcggacctcttggtgctggtgaggtagacagcaccgtaaaggaggacgatgccgcaaagaccgacggcacgccacttgtaaggagacttttcggtctgagggataccgaaagcgctaccgagatagagggcgagcagagcgacccagctaacgatgagcttgatcttgtacgacatcatgtcccaaggcttttcaaagacgaatccccaagtgcccgagatgactcgaacgaaaggcttttgcgagatgtacttgttgttgtggaagaggatcaagaggatgaagaaccaagtctgaaaagcggaaagtggcggtcagatacgagatatttcgtgaaggggctagacggtgagaacccgctgtcgatttccgtcgagccagaagatcactcacgaaaatggtcgtaatgatccaataatgcctggtctcctcgcggatgatacctgtagacggacacagagtgagacctgtccctcgtcaagtatggacagtctgcgccagcttaccggggatccaccatccgagcttcagatgaaacatggaaaagggtcagatgtctattttcgcttgataccaacgacttcgagctcaccaagagaccgatccaggcgaaatcccgcatgacgcggtaagtccgggaacgatggaagctcttcatccggttgctgaaactaccacctccgctgtcctggtccttgtcctgctcttctgagggagagcgcgaggcctcaagatccgtaacgtaggcttcattattgtaaggagccttttcgtcttcagaacgcagggaacctgatgcgagcgccttgccctcttggttgttgacctgggtggtctcaaccaagggttcgggtaccgcgatgggcaggtcgtgtgactgggcttgatgtgctcgctccatctcgatgatgatgaatttatgtccttgagcgcgaaagtcgaaacgatacgcggggtaagctgaagacgaatgagaggtttcgcttttgaccttccggagggttgagggaacactagtgggcgtgcaaagtgcggggtggatggttatatcctttgaagtcggagcaatcgcaaactctcttggtgggtccgccttggtcttgtgctctctcgactcagataagcccgggtatggccatcgaaaagacaggcaggtccaaaaaagcgcaaaatctccctctcacctccatgccatcctttgcccggtacccgccaagctgaccgcgcggttcgatcgtcggaggagaaggggactggaccgcaacacctccctcctgattcttctgccttgcctggccggcccgccatcctggctgacaccacggtcgacgtcgacgtcgccgcgaaagtcccgacccatgtggtctcttgacgagaccgcgatagagaaatctcgcgcggcctccaccgcgcaaatcttgtgcctgagtgttccacaggctctcgccgtttgcctcgcaccggccttgtgcgaactgcgtgtcacatggtgccatgttctacctccccacagatgccgagatcggtcgccgcgaaccggccaccttgttgagcgtatcgattcactttccagacgttgacaaccgataccccgcaatatcgcagactcgaagataatgataaacgaaagcttgataccaagacatccgtctcacgcctcatcgcgatacaatctacccctatctcgccggctctggatggattgcggggaagacgatatcacgacccatggttgacgggagattaccagcccgcgggacttggacttcagattccttccgaggccttcgaaagatcggcggaaatgtttctgagagctgagcgaggcttagaaccatgcggtcgagatcgtgcccacccattctcggccggtcgggcgggtaataaagatcaatatgtcaggaccgggagacgcagcctcgacgtgaatttgatcagatgaccaggtatcgagattcggggtgtccgaagattgcaaagggcgggttcccgatatcgtcggatcatgtcctgccaagcggtcacgcgacgcgttgccagaagccgaggtcgagactttttattgctatgatggcgaccggttcggtcatgcccgtacgtaacacgatagagagactggacgttccctagcatgaccctcagaccagtcttgcacgatcaacgcaacgatccagacaaattcccgttgataacgtactcgtcgttctgctttacaatgttacaagggcaaaacaatagacgcgatactcgaagtagaagaattggaaacagctcattatattccggaaacgcggatgatgcgttgcgggttcgtatgcgaaagggggtaaaaagggaagagacaaagtcaaaaaggattgttttaagccggaatggcaatccgaatgcaacgtagtagtcgagcgatccaaagtcgttatctgttcagccggcttttggtttacggacagatcacgctgctagcgagggtgaaggtcctcgggaaagttcgcgttcccgtcgcggcgtggaagagcccaagcgaccaattttgcgcggtgttatgcccgtcccagctcctggtcgtcgaggcgtcatcgagcccgagcccgacgcacccgtcggatttgaacctgttctcgtcgagctgggattggtcggtcttcgcacgctcggtgggacgggtggcaggctttccaggagcctcatcatctctgcgcccttcgatggatcgtcttcggcagacaatgcctttaggatatccaaaccggaagacggttgggatgaagattcggctcgcatacccgcaaggaattcggcggtgctggggggtgcgccagcttctcgatccgcattgcgagaatctgccacgatcgatgacacaccagatcgatctctattccggacgtcttgagcgagagaagcgaagacgccatcgaggaatcgttttgccgttgccgagtattgcagtgcggcatgagatgcttgatgtagcacatccacctattcaacgtaacgagctatatgtcaacatccgatcacgagcagatcgatgacgcctcgagacgtacgtggtattcaacgtcgtccagtggcatggcctcaatgtcatcgccagcctgcaaaacttcttgagccatctctgcccaggcttgaaggttatcgattccagcctctctgcctgtgaaggacgggatgtcatcggccgagtgctcctccgaattttcttgcctctttaacagctgcttctgctcttcgaggacttgcagccggtgttgattgacacgaccgaatattgatatccattgattttcttccgccttgtctctgttttatcgatatgagggaggatcaaaacagaaacccacaaggacctgcgtcgacactggcacggacctggctatgtcctcgttgaacttgtcctggatagcgcgattcgccacattgcggggatttgctggcaagccggcggactcggatgactcggcagccttctatcatgggaaccaagcgtcaggtttatgcgacaacgattacactcctctttgacgaccgagttaccttttccccggaaaatatggagtcatctacatcgccgtgtttcatagcttgaaacaggtcttgtacgattgaagcgacaatttcatcgcccttggatgtcgcgatcttcgacgcctgtgaaggtactagccttttccccttgggcccaacttctacctttggatctttctccttgtcgagtttctcttgtatacaccacataatcagggttcttgcacgtgcagtttgcggcagggtggtcgggatgtgcgcgtggaagtccccagcatcgactccgcggtggggtagagctgaacggccgtcgtggggacctggtcagtgcccctggatctctcgacaattgtagcctggctcaatcctcttgctcaccgatctcatcgtgtagatctgtcattcttttaccccgtttactcatggactgtctcttcttcctctgctccgtttcgtttttccgtcgatcctttggcgtggtccccaatgtgatgggctcaatcgtatctattgtgatgacctttgtccgccgactggcacgtggtgtttggaattccgttgcactcggggcggctctcggcggagagaggggtctagccaaggtgggcatcaattcttcggacgaggcaaactcgaggtctgcaaccaggccggtcttgatagcagaatcatcatcaaggtgtcagtcgctcattcactcccagtgactgagaatcattcgagagattacttactatactcgctcctgcacctgcctcgtttgtcatttctttccagtgcaagcgttgctcgagcgcttcggcttgcaaggttccatgaccttctaaaccctctagcatatccatgccaggtcgtccggctgactctgagaaggaggtgctaccctggctcgatttgactaccgatttccccttattcgccttctctgcgtccatctgtgacgcggacgaggccgctgcttttctagtttggcctgtcgttgatgaagcaatagccacgatgggaggagatggcgagcgttcgtaagtcgcagtggtcgcttggcgggctggacgccgtacggatggtggaggtggaggaggtcgctggctaggcgtggtctcttcgtcattcgtgtcgatagaggagatcgcgacgggtttaaaggggactggcggagtaaagagacgttcaacatcagctttcaagctggaatgaggcattcagtccgagtttctcacctgttttggtctttcgcatcccgacaggtttctatgtagcacaaccaatggttagatggatatagcatggacctccagcgatgaatggtgatgacctacatctccggtcctttgacgttttcgcgtcccatcgaccatatcctgcttttctggcacgtcctcgcttccaatcgtcgtcccatttgccgaagttctcttctttcgggtcatactatctaacatctctatgcctaatggcgtgtcctgctcatcgttcactgatcctcccgatagacgggctgacgttcggcgcgtcgggatggccatctgtagtgtctaatttgtcgtgatcccgtccggggcctggcttgtatgctatttcgcaagctgcaggtacggttgatcttcccctgaggcggcgtctttgtgcgttctggcccttggtgtgctctgggtcttactcgatagcagacgtttcgcatttggtcatggtcatcggtgagcgagtagaagttgaatgcagaatgattccgaccgagacgtgacgagtttgttttgattctgaatcggaacctcgagagaactgagactcgacgcgaaccgaatcggtcctcatattcatcccctacctcttctctcgttacatcactcgggacgatccttgtcacataaccggcgacaggtttgggcactcgacctagaaagacaatgttgacccagtcaaagcttcagcacgaccagattctctccttctcgtcttggctgcacacggcagagggttcgtcatgtgctgcgacatgagccggtaaagcaagcaataacccgagtctaacgaaatatttgcctagaatcatgccgggttcccagggaccacactcgctggtactatccacagttctccggcattatatgctatcgatagtctaggaacagacgctccatgtcctcttccatagagatctgtgtacaacgcgtgatatatcttttgtcccaaatatgttgaagcatagtctactctattcatcgtccggctcccctcgctgcctctcttcgcatacgcctgcgagcgaattgtcagacacgggtgagaagaaacgacatcagttgcagcacaataaagttgagcgcgattgcatctggaccctactgacctggcttcccggctcctgccctcctctgacgcctgcatcatttcggccgtcaggggtatcatgactggaccaaactcgtcccggtcccagtaatctctccatacacctctcaatcgtttgggagcgtcttccctagattcgtactgtatggcaccaggaccatacaagcccgtttcgtaggcgtcctttttgtgcttcaagatctcctcgtgaatcgcatgtgcgatgataggtttcgcttcacccgtgagaccgagctctgcgcaatacgaagctgtgaacgtttctggggtcattgtcgacgagagatcccattcgatgcgatccctaaggttgtaggtcgatatctgcacgtcgagctgggaagtggtgatgttgggatcagatttgaggtctcgagcatatggctcgtcagcccaaacttacgttgacaatgacgcgacaatcggcctcttcagcttcgctctctttgggtgcagccccagcttccttgatctccccgttcgcatccttgacgacatcgacgtctccaggccggttgaacctgactcgcttatgtatgcgatcgaggtccaggccgataccgctccgcttacccgccccgagagcgggactctgggctcggctactcagatctcccggaagtggggtgttgttgccagtcaacggcgtcccaagccccggtgtactggccgccgcgctcgtacccctgctgcgaagaccgttcccgaagctcttttcagcgatcccagaaacaccatcagcctcatctccctcctcggcagggttgttttcaacatccgcgtcgtccaagatatcaatgtttaagagctcggcgtattcctcgcattgtcccaagatcattgtcgcgatcgaatcggcgtactgcgatacgttgatgtgcaggtcgcggcacaagaccatggcgaattcgtatgggcttatcaatcgttctgcatgcgaacacgtcggtcaatcgaaaccgtcaaggtgacttgatatttgcacgagaaggcctcaccgttgacgttccatgtaaagtagtcacgtatccggtgtgtctcggtatcgagttcgatccgtattggtgctagtagcacgggcttgtaagcttctcggtccaactcgtcttctccactcgttctgagcaacggtaaagtcattctagagtcagtcggggaagctcgaaaatactgtccgaatcacgccggctcacacgcatgaaagggtcattggatgggccagcgaagacgtgaccctatctgatggggttcgatctccgagccaggaccaaccggcttgaaggtctccattcgaaccggcatctcctcttctcgactgctgagccatcctacggctgtacctcgtcccaccctctccagcatcatcgtcctccaacccctcatacgcatcgtcctcggcataattgacccgggtcgcccgccgtctaccttccggcgcgacgggtgtgctcccgccaagcccggcattcgtgatctgagcaaaggcagcgttcggacctccggtaatgttgatgggttgaatcagggtcgtcacaccggtcttcatgcggctctcgtaggtggtcaatttagcttgagccagaggtcgatggccgtatttacccctcgacatggagccgggaggcatggcagccagggggtaattcccggagccataagatactggtgggatggccgtattctggagctgctggtagctgggctggtgggctgtttgctggacagggtaagggggagctggggatccgttcggtgagaacgcgtttgcggcaggtcgcagacgagatggtacggccggcgtgtacgttttgagcggagcttgcgtaaaggtagcaggggctacggtgacgaatcgtaagtcaatccgccgggagggctcaaggtgtaaggcaagacttaccgctgactacatgtgtttgtcgatagtcgaccggttttgatggaggtgcgagagccgctcgagtaaccctaccgggcgctggactgcctcgatccgacatgccgtttcgctgaagctcaattcagttccaggccaggtagaagtctgatcgctaagtagtatagtgtaaacgcaggtggctggagattttggaggaaagagagaggattaaccttaagggttgtgggttgacaacttgcttcttgaccttttcccgcaatcccactcactcgctcggacgcgcgcgacggaagtagtcgttggctgcacatagctgctagctagctagctgcgtgatgttgctatgatgatcgtgtttgaagctcgattgaatattgaataacgtacacctgttcaagatcctgtacaaggataacatcaactagactaagattatataccaaggtttctgggtttacgatcttgctgaatttggacaacccgcgagcgaaagtctatcccagctacgtctcaaggacaggtcttcggggttttaagaggatcaaaagtagactagaacatggttcggagaggtcctcgatcgcgatcacgatgatgaagaccaatggatctctagcgggaggagcgatggtcaatatcccgagcatctctcccttcggatttctgcacgatgaagccaatgggagcagtagccgatcggtgcaacccgagcgaaacgtcctggacaagtttgtgagagcgggttcacaggtttgcatagatcgagacgataactgatgccaagtggtccacaggccacagtctacgtaccgaagtggctacattcgatccccaaatctatgtacgatgtcccgttgccacctctccctctcccggtcgatcctagccaggcagccgatgtctttcctctaccgcttctccaagatccttacccttcgatgcaagggtccttcgggctgcaagatatcgatcctcccgacaagaacgaatacctgccgaggttacaagacaattctgctgcttatcttaaatatttcacatgcttgctcgctatggagcaagaagaattgcgacgagcagctggacgacaggtcatctacggggtgccgatcaccagacaagtgtccaaatccggtgcgcccctactaggaccagctttgtggcaactccggatcccgggaacgagggaagactcgccccgcctcttcatagacgatcgattgcgtatcaggggtctataccgtcaattggagaccgcaacggagacggccgtccaagccagaatcacggggaccatcaaacgagagggcttggtattcttcgagtgcccagctttggaagccatggatcaacacctgcggcatcatccttcaggaggtagccatgaatacacggccgagtttccagctttgggtgttcgcggacagcctcgcatagtgacgaatcacacaagcggagttggacccgagtacatggtcgaattttacccatcgacggacgcactcattaccatgcacaatgccgtcagtcttcatttcttctgcatcttctgctacgtttgtggaatccagcgcactcatgcggtacttgtaattctcgtatcaccatgtcatcgcccggctttctcgatcgatacatgcgccaaattgaatacatgtctacacagcttcgacgtgtggcctcgtgcttggcaagtggtccgaaccgtacgccgacccacaagtggttgtttcctgctttacaggacatcaaggagaccttgtctcgttccgatttccagctcaagccggtagcaaggaaggaagatgcagcttccgtcggggaagaaacaccgctcaacgaacaacaaaagctggcgatcaagcgagtcgtcggatctcaccggacggttccatacttgatcgtcggaccccctggtaccggtaagcgaatcaaacgttctccgtaaacgcatccgcactcaagccctgcaatccacaggcaagacaaagacgatggtcgaattggtgctccaaatcctagcacatcacggagacgcccatatcttgcttacggctccctcgaaccctgccgcggacactcttgcgctacgccttgccccttttctggacaacaagacgatgttgagattgcagagctcgacgcggacatttgcagagacaccaaacgagatcttgagctattcgtgtatcgtgaacaacagctttgtcggtgagcattgccctcgaaagtcaaatgcaactcattgtatcctgattgcggggccatgcggatagtgcccccatgggtcgatctcgtaaagtaccgtgtcgtcgtggtcgactgcctggacgcggaactccttacaaaggccaaagcgaccaacgctgagatgctgagactcgaaaatcggacattacaagctcttggccggaggaaaagtaagatcagtttgcaagcccactggacccacctgctcgtcgacgaggtaaagtgtttcagtcggatgatgaacagcgcgacgaagctaattagcgctgcttcaggcgggacaagcctccgagccggaacttcttatacctctggcggcgatcatgatcggcccggatgaagcagacatgatggggggtcgagaaccgcaggttgttatctgcggagatatcaagcaactgcctgctatcatcacttcgagtcgtgcgcgaagtcacgcgctagacgtttcgctcatggagaggcttcaggaacgcttaatttacgatctcaaggcaaacgtacagagtgaatcggtcaacatcgtccgtctgatcaataattaccgcagtcatccaggtattctcttgctacctagcaccatattttacgacgacgtcttggagccggttgcgaaagtctcgctgtcacaatggccagaactgccaaacaagaggttgccgttgctgatcaagggaatcgaagccgacgaggactggatcgacgaggtaggtaggcttctgtgtcgagacactcaacagggagctcattgctcgaaattgcaaagggcgcaagctttttcaatgtatgtctcaagatcatttcggtggctgtctgccaagatctgaatatcttgtccactggcacgacagatgggcgagatcgcggaagtggttcgcactgtcaaaagtctagtgaccggcctcaaggcccgctacactcagcgcgagattggtatcatcacgccatggcgggaacaggtctggcggattcgattgaagctacgagaagcgggctatcacgacgtcaatgtcgggaacgtcgaggttagcacctgtgtggcaggccttattaacgcaacgcagacacgatagtaagccacacgattccttctaggcatatcaaggtgccgagttccggtgcataatcctgtcatgcgttcggtctcgcgagcgcttcctccccagtgaccgtgagaatgggatgggtctgatcaatgagccgaagcggcaagtacctagacgtgcgaagatccgatggagtcgcagtcactaatgtactgcctctttgtactccaggttcaatgttgccatcactcgagcaaaggaactcatggtcgtgattggagacatgaactgtcacaaggtccttctagtctcgccgaaagatgactaaattgaggttgacttgacctttatatgaacaggtcgattcacattggatggctttgttacagatcgcctcgcgtcaccggttgtaagcagaagcatctagtcactgtggagcaccggtgaccttacatttgtcaaccctctgaaacagctacgtaggacccgagctgaggaatttcgaagtcactggcgactatatatcacgcttggagtatgtacagggcttttcgctgcgtttgacgggctctaacaattcatcccctcttgccctctgcacaggactcgtatctatcccgagacacacaacagcgccgatgatgtgtcaatgcaagcactgctgatctccggatctgttgcgcgcgaggctctgatggaggattagagcccgggtgtcgacgtatatgatcatcaaggggtatgggtgacatatacaagatgcctcgatccgagccatatcgatgtcggtacattgtctagcccagacgtcctatcgtgtgagcactgccatcggccggcaagggctattcaacgttcgaatttggcagcgggcccttttgtgcgggaagatgccattgaggatactgagataagagagtaaggtcagatcagttacgagccttccagccattaaatattgcgtcgctccgagactggactcacctcctgatcgcttgcccgaagtcttgccatccgcctgcagaccgctccgctgcatggcacctttggtgaacttttcggagaccgattttgcgttgacttgcgccctcgctcgtacgatcgggggcatgccgcctgcactcaggctggtaggcaggagatggatcgtcgttttgtcgctgagcagagattggtaagagagggtcaataatgtgaggtttcgtgaaatgggaaggggtgactcgaaactcacttgattttgcgttgcttcggctggacctcggcccgcttcatcttccgtcgagctcgcttggcctcttcagccctggccaactctgcctttctggccatcaacttcttctttcttgcctcgttggccgctgcggccgataagactgatgcgggcagcatcaaggggcccatgtcgtattcactcgactcgtcgggtactgcgactacggcttgcgaagcgggggcctttttggcggatttcgaagaggtaggtttggagctggaggaagaggctgtggcggaggctcgagtctcggcggcatccatagcggcttgcatacgagcgtgtagccgtttcgtttcgggatcctcgtccatcatgctcaaatcctcgtcgtcctcgtcatcatcgtcatcttcctcgtcatcgtctaggtcgagatccaggtccgcatcctcgtcatcgtccgaatgaaaagattccacatccgaaccatccatatcgacatccaggtcttgatcttcatcctcgctttcttcctgcggcaagacgacagcagcctttttccccttgctcttcttgccagcttttgctgcgaccttgctcgcctcttccctctctgcagccttttgagcttctcgtgcggcctgtagcttggccgatttctccgctcgggcctttttcttggcttgtaaagatctgtgtgtaggcagagaacaacacggtctcagatcatgatgaacatggtggtcgaggcagagctgatccaaggctcacgctaatcgctcttcctcttccaatctcgccgcgtcttttcctacagagagcccgacagcctctggcgcatcatcatcgtcatcgctgtcgtcctcctcttcgtcactatcaccgacatcgtcctgatcgaccttggccgagaaatcgtagacctcctcttcctgctcgtcgttgtcatccccaaagacctttttcttacccgaagagatgggaagaatagctgcggattgttttgggttggaggtttgctttcgaggcattgtgtttcgtacgtcgggagtgggcttatggagccgggcgtgggttatctatttgatcgatcgttaaactcgggcgactttgatcttgctggttgctcaatcgttcgataatctcgagagggagaggtcgagtaggattacaagtcacgtgatgagccagatcgccgccctgccgttatctcgcgtaagtcctgcttagaattcagaaagcccccgaccttccgaaatacttccgcttgccatctttctgtgccggctgggaaaccctgttctgcaggatcgcggtcttcaaacgtcgttgtaaacatctcgagaagagctgggtcttcttgcaatatctgcgagagctacggtacagggttgactgtgtcgagctgtcgatgccgtcgacacttcgtcctgaaacactttcgcagctccaccttcggcatttgttgttttgcgttcgcttttgttgttccccgtcgggcgaaacggggtccccccccttctctgtcgagcttggtcgcacgcgcggattaaaggaaggtttcgagggtcaggtcgaataatggacgcttcgttacatcatctctcacacgcaattttgtcttcgacaagggggaaggtagcgtagtgtactagtgtaggttgtatctacggtcgtgtgccagagatttcgcttttgtaaagtgtgcggtcattgattcccggtcgatgtacctaccctaccatcttgatcggaaggtcatttgccggtgttcccccgcagccaagcacgcgcactagcacacactagcacctctcgcttgcatcaaccttcaatccaatcgacatcacccaccatacaggtcaatcaaccatatcatcaatcatccttcgaccgagaacatcctcatcaccaatctctcgacatcgacgaccctatacgaccacactcactttcacaccaccctcgctccattcgtcctcgaaagacactgttcccgagctggctctggaatcgcctcgccgcaggtagacacacgatcaacaacacaacaaaaaaacacgcctggccccaatcggcctgcaaacagacgaacagcacgacctccaacctcacattagccctagcatcagacgtagagagactggcttacgaaaccaacgcctattaggatcctcaagtccagctttccccttacgctcctttacacggtcattcggtcgacccgtattatcggttcagactggattgccagatctcgacctagctagcgcgaatcaagagtccttccacctcgtcctgtgcccacctcgacatctacttttactgccattatccacgtcctggacttcgtctaaaactccttcagacattcgaccactctgatcaaaggagtttcgacccctttcgtccccaccctcgacttcgcaacgatgaagctgtcgaccatccagctatctaccctcttctccgccctcctcttggcatcacctgccgccgtctccgcactccaacaatctcatcatgtccagcaaggcagacatgccagagctcacgatggggttctggcacgacgggcggtcaagcaggagatgcaggcgagaggagaacaagattgggtccaggagagacagttgatccctattggaggtgatgacgagaccgaggacgagacgaccagcgtgagtccccagacccattactcgtattggcagaacgtctgtccgtatatgaccaacatcggcatggctgattgacgagggctcgttgctggtacgttaggcttctcctcggaccgctacgtctgcggccgtgcctacgacttcggcagcgcccgtcacgcctacgaggccatctgccgccgttacacctaccacgacgaccgctggacgtacctcttcggtcgctgcggtcacgcctcctacgaccagcgccaacactccttccgttacttcgacgactcctgcgacgccctcctcgacctcggtcgtcgtcgtgagcgagaccgagtcgaccacgcaggagggcggggtcacgtccagcggattggtcagttctgcaggtatcagtacaggtaccggacctactggaactggtgagtcggcaaagcagcatgacgtcttcattcagtagagaaggccaacaatggaacacattgtcttttggggatttcaggtattttgaccgccccgacaggattgagcagctctacaggactggtttctgcaacgttcgtatcatctctttttcattatcgtctcatgatcgtgtcgttggggtatcgcatgcccagagaagctgggcggcgctttctttcttttcttttctttcctttctttctcttctccatctttccctctcaccccatcccatcctatcctgactcctatcgatttcccgatatcacgaacacttttccctctcgctacctcgtcgtggctttcggtcccctcttccctcttctccttggttcatctttggttacgcggccctacttgcggtatacacgcgggaaatccatccgtcactaccccatccggtgctttcggtgaacgtcctctggcctttcactaaaagcggaataaatacaactcctcagatgagggcaaacgtctcgacgaccgaccggagctctacaagactggtgacatcgacatcgagtcgggtaccacctataaccccggtgatagaggaagagcatacaactacgaggtccatcctgtcctcttcatctttctcgcccgacctgacctgcattttgtagccgagtcgcgcatggccggaccgagctgactttcacctgtccttctgttcctgacagtcgagtgtctaccaatgctcagggatccgtagtatttatcaccgaagtccagacactctccaggagctctcagagcggcgtggtcgatcccgagacggccaccgtgctcgagaccatgtctgcgggcaactcgaacagcacgtccaaccccaagggcaaggaagactctggcagctcgctctcgaccggcgccattgttgggatcagcgtcgtcgccggcgtcattgtcctcggactcgtcttgttcctcgtctggaaactcaagcagaaaagattcgccagctttgacgatgacgatggtgagtctttcccgttttgtcgaggatgagcagcttgatgttgacaaaggtcaagttgcgcgggatctcacagccgacggaatcaagtggtatgtccgaggccatagctgggcacgctggaccggccttgttactgatggtgttcatcttccaggcccgaactcaaccgacacggagattcggctatgaacttgcctctcccagccaaacctaccggcggacatggtttcgagaccaacgcctttgtgagtccggcagccggcgagtattgtgcgatcatcctttcagtttgctgaaatcgtcgctcgccgaacaggaacgaggacggaccgaccttgatggcaacctgatcgacgacgattacgatccttactctcatcaaccagtctcgcttgccggatccatgcacgatgcctcgccgtattatcacgatccgtcgccgcctcttccgggtagcagcatgtcgtatgcggacactggtgtttatggttcgggcggtgtcggggtcactcgtaatccttcgacgggcgcatcgacctttttgtccggccattcggatgacggcggcatggcgtatggtctcggaggatcgagggcgtttgactcccgacctgattccgagatgatggaaatgaccgagaccagacctggcggactaggccgaagcggatctggtcgactgctctaaatgggacgatcagtctttgataccgggctcggccacgttctctcatccccttcccatccaccgacaagctctcgagcgcattgacgctggtggcacgagtcagtagtcttgagcctacagtattccacgcatgtatcgttcctttttgtacactgccggtcaacttgcccatcatatcccattcagcatatccattgaagtttgtcgagaagcccaccgggagcctcaagcgcgtggtaatgacgccgaaacttcgcgaccaggaggatcatatttgaattacaggaatcacaggagcaataacgttgtagctatattatcgatacgtcaacccgagaggctgccatcgctacaaactccagcttgcctcgttcatcactcacgaacacaccaatatcaggtcgtagcatccagcagaatgcctgccagttggttaaaccttcgacttgctagcgtcctgctcgtcttgcttctcttgcccgctgtcctggctttcgactgccggattgatctgccatcaagcaagagcaagggtaaggacgtccatttcgatctcggacccctggatggcgagcattctggtagcaagactactcagacccctcccacgacaaacgaagccaaggtcaggctggtactttgcggagatgagggtttgaagcgggattctgatgtggccgacgaagaccaggtgtgtttgaactccccggcttgcgtatcaaggcatacagctgaagtaaagtatcatgttgctgtgatagtgtccggaaggaaccaaagtttgcttgacactgctgaatcacaagccatcctcgtcagagggcgctcgggtgacggcggtgattccgatctggtcgaccagcaccgcggaggacgatatcaaggtgtcacccaggggggaagaccaaggtcttgacatcagtgtggaagggccggaatatgcagggtgagttgtggtgctgttcaatctcttctcgcttcgcctatgtccagctgatcgagtacacatgtgattatcagaggacgacaacggctcaagctgcatcttgtctgtgtagccgactcgaatgacgagaaccctacattcgactcgtattcagacggcactttgaccatgacatggtccacttcggaagcttgtcccaaggccgcagacggtagcgaggacgtgccgactcccgaagaaaaggctacatcgagcggtagtggtgtgggaagctttttcaaattcgtcttctggatgctcttctttggactgctgttctacttcgtcatcggtgcgtcgacgtgtgtctgattgcccgtgcccatggagctgatggtgcttgtctctaacgtctgacaggaatgtattacaactacactacttacggctcaaggggtttagacctactccctcacaaggacttttgggtggatctgccgacgatgctgagcgacctcttttcgcatattgcttcgaatatccgaggaggcagctcttccggcacgagtagacgatcaggatacacctcgttgggttgagaaggtgggcaggtgggaaatgatgccaagggggttacagcgacctgtcgatttgggcgagatagatgcacttcatgacggattgaaacaactttgatacatgatacagttggatagactggtggctacatgggttctctaagaagagggaaataagaggctgcggtttggcgatacggccttcaggccttgtgaccgccggaaccgatcccaacgtccaggaggaggtgctccttgtcgatccttttcaaccagtctacggcctcgccgaccttggtcagttcctcccagttccctttgcggccctcccaatcagagatcttggctcgtttgtcttcttcgagcactctgagtcgcaaggccagccattgccaactcttgacctgaatgggcgtcactacagctcagtacgcgggccctccagatcatcacgtaagcccagatcgatatacactcacctctttcgaaaactcttccagatcatcgacatcgccttccgcaaagatgatacctgggtagccaacctttccaaagcctaccaatccgagttgagaagacaacgagacgaggttcttgcgctttgaaggcgcgaggagatggtgcgaggaaaagaggatgtggccgggtcggtacgacgtccgtttcgactgcttcccttctcggtcgggcttgggctcgacgtttggctctggctctttgatcagactctgtagtaagggcagaaagtgctccgtgatcatcgtcgaaagtgcgtatcccgtctcttcggcttcctcgccatgatccgcaaggacttcgtcgacccatttctcccagccgagcgcttcgtcccggttcatctccgtcgacctgatctggaacctgaacttcttcaaggtgggttcgtcgacatcggaatggtcctgttcgacgacatgtatactgtaggtgctttccttgctgatgatctcgaaagtcaacagggacgtgggcgtttcgtccgaggtgaggatgagttgttcggcggggagaagcgacgatctgatcagctcgatttgctcggaaatcgccgctcgttccgacatgtccgagttcctgggatggtccgatggcgtttgaggctcagtctgatgtagcttgataagttgtaggcttgttagcgaagcaaggtgaagattacgaacgaggtatacatgccatatgctactaagctagctaaactcgggtcgcgccggccggaccgatcgcgctcgggtggtggtagggaggtaggtaggtcactcaacatccagagactctactaactagagacagactatgtccatgataccagcccgactatgttgaacacacacttctttgttactgctatacttcatactcgtctcgggctcgctctgcaagcgtcaatcacagcttctggactgtccagaccatattttgccgaggaacccgagccgcctttgatccgtaatcccccagtcaagccattctaaacttcgtttcatccgggccggcctgatcgaagcatcagtctcgatcccatcaaggacaacaagcaccacttctactgaactgcaggatcaaaggtctctcagaaaattctcctcatcaatcgacccgcaactcttgtagggttccttaaacaaagacatcattgacaaacatgggtcttctctcttgttgcggtgtcaacaagctcgccgaggaagccagactgctgaacgactgctatcccccttcaaaacagcttgttccggtagcaaacgatgacctaaaggcatcccaggacaattacaaacctctttcgcaagagctgtcacggttgacatattatgcgagcaataaaccgggcaagctcaatcggctcggctcggagctcgaagttcgggcagctggagaagcaagaaaggcttccaccggcaacgttaagagtaggatgtgagtcgaatcatcgattcacatccacttcacagtctgactctgtacttctcacatccttccagctccttcctgatttccttggccatcctgagatcgctgctgtccgaatgcaagcgcgacgtcggcctgttcgcgacgagcgtggtaaacatcctggaaaaggctcttgaactcgccagcaagcccattgctggaggcggaatcgacctagagatcgccatccgagctgtcgccgtggtgagctcctaacgatttttccggtcgaccaatttcatcgtgttgaacggaccgatctgtaccgcttgcagttcacctcattcgcgacctatgtggatggagctgcattcgcggccgatgactcgaccctcacttcctacttggctgtcctgcgcaaagtggccgccctggcagtccagccggatgcgtccaaggcacctctcgtcaacgaaaagggcggacgagattttgaatcgaggaataggcaagtcggaagcccgtcagatttggaccgcgacggcaaggctgatcaatgaagattacatgtacactctataggacccgccttatcgggttggctgcgctgtcggccgcagtgcagtcggacgttttccacacgagcttgtcagacttcaggcagcaagccgaaatcgtccttcctgcgctgatgcaaaacctatggctcggagatatggatgacctgaaactgcagtgagttttaatccatggacctggaacgctgtatcttatctaacaatcggataattacgccaggaccgctcgagtacagatggatttctcaccttcgccctacttttcggaattctccgctcgtcgtcctgctgcgcagcgacgagccccttcattgcacaagcacattgtcggagaaaaaggtcctactactaccgacgtgatcggtgccgcgctgggaacgcttagagagctattgtcagactgtcactcatcgcaacttgcagacgctctcgacgtatctttgaccagcatcgatcgaggattccccgagtcatcgtcttcggcatggtctgacgaggagaggtgctgctggctggctgagaatatgacgaggttcaccatgctgccataccggtatgccatgtcgtcgaccttgctcgagaggttcatgaccgatatacagcggacgcctgttactcggcaccaaatgactctgctcaagatgctggaaaccctctggagcgcggaaaacttgtccctcaccggcttctccccgtcagaggccctatccgtcctgttgacggccattatcgcacgtttgaaactggatcaccaggacacactgctggttccgctcgtcaactgcatctcgtccttgtcaactcatgcatactatgttggtcaggccgacgacatgatcgaagaagtcgtgctccgaatttcggaattacagatggctggacctagactgaagcgctctcgaagtaggagggaaagcactgccagcggatcgtcgactcccgctgtcgtcggatcgtccccagtcaatcctgcggacgccgaggctatccgaatcctggtgacctgtcttatcaatattcttctcggcaattctgacatcggcgaagaaattaggcaggaaggccaccatgatacaagcagcaatgtccaagcggacaaaggaaaaggcccagccagggtcgaatcaagagcatctgtgcgaaagggtcgaaggaatcctgtttcgccagaggtgtggcaggagacgttgccgttgttatgcgagagcaaattcgccatccgagccgaatacgccaaagctctcttactttacctccgtcaggaattacccgcctatcaagcgttggattcacggggggtgtctgaggtacagccctctatgcgccgatttttgcatgcactcaccgccaccttatactccctggcaatcacgtcgcgtcttggttacgcaggtcctgctcttacattggacgggctcacaggcaagcaagacgtattgaatgacttgccgaatcctcgagtgcaggtcgaagctcctactcctggtctgtccacgcctcaggaatcgaatcacctggaggagaccccaaaaatgactcgccggacctcgaaattggtttcgctgcctttcaacagacatcactcgagctcggccgtcaatcagcagggaggtggacagatagcggaagataccgcaggacccttggactatttgatcatacaagaggtcatatccacggttcttgattatttaccacaagctggtctcctcaccatagcacccatgctcctggcccttgatcgcgatgctggcacaattttagtccggaagacacacgacgctagagagtacatctttatcaacgagcgacgcagggcctgtcgagaactcgtttgcttcacgtggctcggattggctgagcagtgtcaagtagcagggcttgccgaggctatccgagaggtgagagttgcgacacaacgtccgtgcagaatcttctgctgatttgcacatatttagacccgtcgtaacatgcctgaaccgtcaatgacaccccaaggtacaatgcccaaagcatccttcggtctgtttgctccgagcgaaatgatggtattcccgacactatctgctcgcggagagggttctactgcttctaggccgatcgctcatccggaactcattgtttcacaaatctcggaaagcgctgctgtacagaatcgactttcgcttgaccggagcgaattggccgatagcctaacagtgccatggactgtcgagtcagccctcgccaactctatcgaattgcctgtcgcgaatctgttgaggtccacgagcaagcgatctcttaatctgagcccgatgaagggctcgaattactcggtcgagagtcacgacggtcctaatggttggggtgtagatgtggagggtctgcggggtgcattgggtaaacaagctactcgtctttgatatcaatcggagtgctgaaatgtcttcatattcctcaggagctggaggtcggccacgatcgaaatcccaatcgcgatcagccgcaccgtcgatagatggcgcggttcaagggcaagaggggcgtagaatgcatccagatgatgccaaggtcagcttatttcccgcctttctccgaagccatattataccacgaagtcgaagctaatcagatggtgtgacaggaaattctgaaggatattttccgagaccgcaaagcgagagcttcgcatatctctgttagagcttgaacgaaatcctcatgcatcacacccgtcgtctcgcttcctcttccctagtcctaaagaatgacaattccgtctgcagccgaggatgactagttcggccggggcctgatgtcagaccccgaatgatatcgtcgtagataccgactaggaaagatgcctgctgagctggacttttcatcttttggctctgtgttgttgtcagccggctaatctcggctcgtaggcggttcatactgtaagagcggagacgacagatatatcagtagcgatccctcgcattgtaaagtcttaagataccatcaccaacatacctcgtgaagaccatggcctcatcttcatcgctgctaagggcgacgatgtacgagaagaactctgcgtatttttcgcacacttgccttactgccgagtcctttgggcccttgttgagcattgccccgaaaccgcctccgatggcggcatcggcgagtttcttcacgctatcgacttgcgccgtcatctccttttggaagatcggccacatggacagcttgagacccatgcatatgccctccatgggtatgcatcctcgtgcgctcgcttcggccatgaccgcgtcattcaagcgaatcatggtgagcaatggtattgctggcggtggcgctaaaggctctgcgatgctgtcgaaaagcgcctgaatgggaagatttttcagctacacctcgatacttcggcagaaggttgtcggttgtctgctcaccttgcaatattcgactgccgtctccatgacctgcttccagacaacttccagcaagcgcagtgcttctttggagggttccgatgaaaccttttgtatcgagtccggtggtggggtagctgttccagtatccgaatcggcatccatgtctcgcatattcataccgagtccttcagacgctgcagaatcgccttgcgcgctcgacgccatgctcatcgcactgtccttacgagtgagcgctactgagcggagagcgggactggcattacccacgctcacgaccgaatttgaccgaggtaccggaggccccttgctaggcctgtccagggtagcggcgaagaatcgaacgagaaacgtgaattccgaggatgcgttgtcgaggaggaccaagagcaatgaccgaaagaccgcttctacgggttgtacctggagattcaagaaccacggttcattagcattgttccattcaaatcgttaggaatgaaactcacaaatgctttgttctctgcttgaaaacccagaatgaccggttccgcatcgatcttggcgtattttagcctgtccagcttttcttctgccttcatagcgggagtcttgatctcggttctatttgccggggcttcagaacgaccggggagacgacctgaaagcaacgcttgggccgcgtccgacacggtaggcgccccaaggagatctcgaggctccgacgaacgcgcctatggttgttccagcgtaagctactttcaggccgttgatcacacagtacaggctgaccttgaccacagcgagacttcttgcatagcgtctgaaacatgtttcatagtacgccctcgcgctgacaacatatgctcgctgtacttcttccgctactttgggcgcttgtcgatgcaggaattgaaacagcggtcggtatttcaataggatggaggtctgcacaacctgaatattggtccgcacggatgctcgcaacggccggatgagtccgagcaggtgttgccgtatcgacacgatggcctggataacagagtgacgtcaatgtgctggcattaccaatgccgttcgatcttccaatactcacctttgccttgaggccttcgacgaccatgccaatttcatgactcgctcgcacctttcccctcgctctgactgcccagattttccgttcaagctgagcaatcgctgggatccatgcttcatctggtacggtatcccggatcaaataaatgagatccgggggaatgacgagcgatttgatgagagagttgaggggttgagctatggcctggatggaggatgccagctcgctcagcacataaaggtattgtagctctgaaactcatcagtacactgacccttctgccttctaattgacgatcgatagcctcgctcttgtcttgcaactcggagatctgaccggacacctccgacaagtcactctgaaatgtgccgagaaatgaagacaagctgttcaagagctctttactcgactgatcacgaggagcgatcctgatcagttcatcagagctacagtatcttacttcgaccgactcactttgatcgagttgtgtagcttgagataatcatctatccgttgttcgtctggtgatagcgatcagcgacttggtctcaagaccgcttggagcctgtgggagaacgtacactgtgcgagctctgctcgctcctgtttcaggtcttcctccgagtcctctgatatacggtccccttcctgacccgatttattcgcttcctgaccggcgagacggggttcgtcaggtagcttggaagaggaagcaaccggttgctaagacagaagtatgcaggcccgttagctatgccggccgagctaggagcgtggacgttttatgtcttacgctttccatttccatggccgcttccgatacgactctgtgtatggtttccagatatatgacgacgatgagggcatcgcctgcaacacaaagtgtcgaccaactcatgagctcatgaacaacacctcggtcaagggccacaaggtcccgctgggtgaagctacagtgttgcaggcggaaacaagtttattacgaaacattacgtcagtaatagtgatcctgcttatttacaccttgaacatcactgacggccaccaacctgaatcagtcgctctgttggtatggtatacatgtctctgttgcaatcataaagggctggtcatccaatctcctgccttgcctttcgaacattttgatcacataatcgactataggaaaattacaacatggcggatatggaagtcgaagagcccaccgtcgagcgagacgaggatgatgaaaacgccgaggaagtcgaaggagaagacgttggcgaagctgacgaggcggtcaagtttgtcgaggacgaagaattcgatcatcgggctcctgaggcagatgtagcctggctactcaaggtagataatcgtcaaaccatgctacatgggcctccacactgaagacaccgttatgccgcacgatagatccctaaagacatgtacgacaggctggccccgatcaaagtcaccgatgaacctaaagaaattggtaaactgcgattccacaacgagtaagtcagctcttattatagatccaatatgctcttagggtattgactgtttgcatccctataagcgggacttgcgaaatcgtcatgcccaacgaagaacaacgtgaacaacctgtcgcttcgtccagcaagacgccggccgtacctcccgctgaagaagaagagaaggagatcgtttacagctttagagagaacgaaatacctcccaagtcgcaaaagtggatgtactacgaagatgagcgaagacatcgttacagcggacggacgactgagcgaggtaagccgaaatgacgacgatgcgacgaggatgaggatagaacatgtaccaacatcccctttaattacagctcgaccaagactcgtatctaaagtcggcaaggaatacactttgaaccggaagatgagcgctgcggcatccacaagagcgttgaaagaagccaatctgagagagcagatgaaaaagaagttcgtggccttcgcgggtcgatgttcccgtttcctgtacactgaaccgacttgtctacctaggcgaacgcaattgatcggagatacaaacttgaccaaggctcagcagaacatcttggcgggaggtgggcaattggagactggaatcgtaagcgatacctgtcggaccaaacgagatccttttccctgacgatcccgcctgtgaccttcccaaatttcagatgcgaaaagcaaccgagaagaaggcggaaaagaaaccggccaaggagcgagcctacaggatcttggctcaaaacttgcaggacatcttgtacgaagagttcaaccggtacaagtactggaagatgagcaccctgcaagaacggctgcaacaaccggtatcgtggatcagagaaaacttgaaggcgatcgccgtgagagaagacacgggcccttacaacagtcagtcgcgagtcagtatctcagcttgagtaattcagcactgatcgatcacttggacttgttcctcagactattggaggctgcaagacaaatttatcgcggcgcagggagaagcagaggatataggaggcgcgccagagaaccaagattactccgatgccgctctcatggcaatcaagaacgagcaggtcgctcaggatgacggtgctctagacgatggcgaagaccgcaagcccgtcatcgggcaggacggccaggcacaatctgggtctcaagctgacatggcggagctgagcgatgctgatgatgacggtgacgaagacagcgagatggaggaggtggatacataatcggtacgagtgtataaatcctggaacaatgctgcccatctatatccttatcagtgcagaagcacaaatacacactgtgaaacatcatcgctgatccggtgccaattcatattcttccgccatcgtcctggtattctcgttcgatctctcccatccgcctgttcgttgccgattgaggatccggtccagcaaattgcgcgctccttctgcggcgaatttcacccgtgtcagcgcttcttctagcaccacctccagtcccgcagcattttcgtctagattccagatgccatcccgccaatctggcgcaataacctgggcttggcggttcttgtgagcgtgttcgactgccgcttcgtgcctcaagacgtctttcaccgtcaccaaacccaagagctgtccctcttgggcaacgagaataactcgaggactgcccagtcgaagagaattgttaggaatggataccgtagtgcaccggcgcacagtttacatagcgacactcaccccattcttcggaacatctgcatcacgatttccagcggtaactgcggagacacgttcagagacgtctgcatatttcggttagcatcgtgctggacgccgaggtgacgcctcccctcacctgatcaacatgccgtcctaggtcgacatgatccgtttgcgtctcggtagctacgccactgcccgaacgcagatcgtcgaccgagctctgacggaaggtacagacgacatcggctgccgatcctctcgtcttctggatcttgtctggaagcgcagcattagctgcccatgcgatgtagggcgaggcgaatgtacctacccaaagcatagcctagctcagactttctgataaagcccaagatcgtattgtcggtcgaccctttgacgacaggaaatcctcgatagctagtagtctgcagaatctcctctgaaagccgaccgattcaattgccaaagacgctgttgagggtttcagcgatatacttaccgatttcctgcgtcttcatcccatctgccttcataacgacaatgtcccgcttcatgacgttgacgactgagatgagatagtcagtatattgacttgcggtaagagagccatctcaacgtactgggctcgaggtaggaagcatcaccagcctctttgtcctccttttcgaggaaagggaacccattgaacttgatcatctggtccgacatgcctccaccaccgaagaaatcgctgaccgccttggtgaatagcagaacaatctacaaacaggtatgaccttcagcaatcttggcaacgaatgatgttcctccgtgcttaccattgttggaagaatatatgtcagagcgccagtcaattcaaacatgatgacaacaacggtgacggtgatgcgggtgattccactgcgcataagaatcgctaataagtcttgaggagcctatagctccgtgtggttatcaatttgactgaccctagagcggcagcagctcccaagaaggcataagttcctggagtgatacaaggctggtctggcgcgcagctagcaaaataactagcttcagggttcgccctgtatacgagacgtattcagtgaaggctccgctccacaagtagcgacgaaggtaacatcctactcactggtacatggctttcacgatgataccgaccatccggccaaagacagctccaacagccatcgacggtacaaagatacctgcaggtaccttgcatccgtaggatagcacgattagcaaggtcctgatgatggtggcgagtaagagggagttgaccattctccactgagatgacgatctgagagaacgaagcgctcagcccgatgttagttctccaagctagcccgtactcactggcacagaccagagtagtctccgccgccttcacattccttgaacaagatttcgagactttccgtcatgtcgatacgtaagaaacggttgaagtaacctatcatggccgacagcacggccaggaagacagcttcgtagatcccatgggtagcaaggtttctgcgtcggaacgcagcgacctggagattaaacttgataacgaaagcgccgtacaagccctggtgaaatggaacatatcagcagacaaatcgtcgattgtaacggccaatgaattcactcaccccgaataccccgatcagaatgtaaaacggaatttcaaagtagtgccaatccctgtcatacgagacttgaaacaagacgagcttgcctgtccgaaaggggttcatgatctggaagtgttgcgggagtggtaagcaagatgcggcaaccgtattcatctgatctggctcactgagagggtgaacgtcgccactaaagcgcatacgaaactcttccacatggttttattggtaaagttatgactcatttcctcgatagcaaacaagaccccgccgatgggcgacccaaacgcaacggcaacacctgccgcactggcggctgtcaagatttctctcatcttggctgttgtcatcacaagctgttattcgctacataatattgtagtgttccggaataggagactcaccatgactcgctctgtacttggaaaacatcccaccgacgacgctaccgacgcaacaggcgacatgcaccgagggaccctctttgcccacagaaagccctgatccaatagcgagaggctacgaattcggacgtaccaagtcagtcctcctggacgaattcgataaagcagtcgatgagcttaccaaggttagactcttgatggccaaagtccaaatactaaggaagccgttgatgataaatccacccaagatgcatttgatctcggatatgcccgatcctgcagcgtagggagcgaaagacttgacgagcttgcccgccgaaaacgagaacaaagcctatatgatggatctttgtatcaatatgaggtctcgtagctcgagtttgcgagagacgaaagatgtgacttacggcaaacatcacgtaggcgatataccggaacggctcgacccctccccaatgcctccattcctcgcaagccgcaccttctgccgatatctcagcgcagcagaatttctgagaaagccaccagcctgtagtgcaataacccagcttcatatccgagagccatgcggtgacgatcgagatgagtgcagcattgagaccgatcaggatccctgcgattcatttatagcgagcaccatgtcagtattcgtcgatctctcgctctggcttgctgagacactggaagaaaggcacgaaccgaccaacgttacgacaacccatccttcaccttcttcccctaaagtcgccagagctcgatatagatatccgacgagcccaggcacattgctcatccgaacagagaacgagttgaggtctttcggtaagtttctcgaccggagatcccgttcatgaagagagtcttcaatccagtctaagatcgatgtaatttataagttgccggtcgaacgagttgtagctggacacggcgagacataccgacagtactgaagtcttcatatcgcctgcgacaacgcgaagagcactcggtgtcagcgatccgcggcaagaagacttggtagattacagaagtcgactcgcctgatctcttcgatctgcgatgcctcttctttcttgtttgccgggagatgcaagggagaactcgtccgtctaataatcgttggtggttcgccgaggtggctcacatcgcgcgacatggcggtccgttacgaggagatgatcggcggacgtcaaacaggcaaaacagtgatctgagatatgcggcgaagtctgataggtataatctacaggctggtctggctgaccttcgctgttgccttgtttcggtatatcgaccttccaaccagccagttgcaaccagcagggatggtaagctcgaagaaaagggtccgagaataaagatggtcggaatcaaatttgcttcctaaaccgtcgaaccggggccgacccatctcgatgcaagctgcaagtcgatatacgtctgaataaggtgctcattgtattcatcaggtcgactttgtgatctactcagcttctaccgggcgatcaagactaaaccgccctctttccgtctccataaatcgctctggtctagtgtgaggatggcgtcctctatctacaatcaccacaagttcgcaagagcgatcctgaagaagtccaggaaatcggagccgagcctgaccatcgagctgtttacagatcactggaagttcaagaattcggtaagtggctggcttaaaaacgcagcgggtgcccctttctttttctgactcgatcgcttgagccatatcaggattcgatgttggcatatgatggcccgatgagagtgagtgcaagtccctggcaccctccccttgtgtggcactaatctaaatagcatttggtttgcaacttagcccttcctggttgcgcttcgggcgcaaaccatcccagcattcctggtgcctcttattcttgagcaggaacctcccatcaccatctcagacggatgccttattgttgagattcatgactatcggcctcccacgcagaaccaggtggacgaaatcgatcgacggagattaggcaccaacgtcttttccaagaatccctttcgcaattcgagatccgccctcaacggcgccggcttagggacgagtgcgaccgttgcgagcatcgctggcgttggctctggcacggctacaccctctggactccccggagcaccaggaacagtccccttggcgtcagggtccggcgagaatccgggcgaaccatcgttcatccgcaaccgggtcatcatgaagcccgattcggagagtctatacgagacattattgtcgatgcatcagacttggaatcggaccgctgcgcgagacaatcaaccaccgcttgactgggacgacgcctctatcctcgaactagaagcccgaattctggttagtccatgtctcacgtcccggtagttgcctttatgttaagttcgactttggcttctcttggtaggccgcgattgcacctcccctttgcctcgatacttccttcttgaccgcacgagtggccaacctagcttccatcctgaccgtaccgaacttgcctcacatcgccagtgatggctccttcatctcacgctcgaaacggcgggaatggctgtacggtacaatagcaaacaaggacgacgagtctgatgccgaggacgaggtcgtcaccgcagcaaatgcgaatcaggaagcggaagagaacgctaggaaggcatctgccatgagcagtgtagccatcggggaaaagttgggaattggcaaaaaggactggaacttgttagtgtttggcagcaagaaaacaccggcggccagtctcgaagcgtcagtaatgctttcatctgtagcgtcatgtacggggtggctgacagtacatcgtgcaattcggatagcgctgagcggaaaccgttcgacgaagagttcttttacagacggcaggctagaactcgagtagagcacaatcaagcccgacaaggagatacgagcacgaccgccaacacgcctgctcctcctgagcgcgagatacacgtaaaagacgccagtgcaccacccaggactcacgatgactttccccctggcaggggcagtatcgatcacggggatggagggtcaaacaggcctcgtccgcggcccaagaagaagaagaagaacaataccgatgccgatatccctgagcctatcgatgtggatcagcctaacaatgtgccacctccaccgccgatggccgagaccgaaggtagcggcaaggttaaacccaaaccaaagccgaaaccagcggccggcaaggccaagaagaggacggccgaagagatgaaccaagagaatgagggtaccgtcgctgggtcacccatgacggtggacggttccatcgcacccacaccgacaacggcgagccgacctaagcccaagaaacccaccaaaaagcagcaagaagctctggccaaacagcaggcagccgaggaagccgccgcggcagctgcagcggcgcaatccgagcctcccaagaaaaagacaaagaaggctcagaatcaagcagcgacagctgccggtcctgctcattctggtcctcctacaggcctgccccaggctgggccgaatttcattccgccggctgggtttccgaacgggaacagccttaatccaggtctggcgcaattcaacggtatgcccatgggtctcaacctgggcaatatgcccaatggtatttccgaagacgaatttctcgctgcagcggaagcgttcggcgcgggaggtctcgacccgtcgatcggaatgcccccaatggaccaggcgcctccgatcaatatgcccctgcaattccagcctcagcagggctttgccggattgaccgaacacatgcaacagcagctggtcatgatgcaaaatgccgctgcggcaggtggcaacccaggccagaacgtgtcgaggcaacctggcggcggaggcggtgggccgggcttaagtggtggtcaatcgagagctccaggccaatgacctttcgatggcggcgacgacagcatttgactgccctgcttgcggcagtgtacctgtacatattttcgggccgaaacagtattattgtagatatgcgatcgcattcgacaccttgcaagagacagccgactatacaacatcaagcattcattcttactaaattagggttcatgacggtctgcatcgttggtaacactcgacacattggaaaggtatagggggggaatatagccactgcggccacggactgatgattgaaccgggggaaatcgaggatcctgtctgctgttcgacaagatggacggtctccgcgattgcgccagtgcggacctacatggccatctcggcctgcaaagctcgtagctgagcctcttcgtcgtcttcttcttcctgccgctgagccgctggatacacatttcgtagaaagaggaaacgccgtcagccggtcgctcgtcagcttgcatcgcatcgccctgggttccgcccgacctaccttgttgatgcgatactgctgaaggtcccgcgctgatgggcgcatgtaccggtgctcgctcggcaccaaccaaccgctcgttcaactgttcctgctccaattcttccaactcgttctttagttcgtcctatcgaaacgagcaaaatcagacgtgttgcccccgacgaggtagaggcgtcatgtagcgatctcttccgcgtgccactcacgtcgtccacctcgatgcccatgttgacggggttgctgatcgcgtccgagatctcgtttgagagatccatctgttcccgaatagattccatggtcgcgtcgaccttgttgatattgctacgtggccgggacaaaggcacaggggtgtaagtaaatcggaaccgctccatgtcaagggaggagccttttggagaacagttgggcagtgacaaaaatcaacgtacagactcccatgaatccccttgagtgcgtcggcacccttcttcatggccaccatggtctcggcgttcaggttggccgtttcgatcgcgtttacctgagcctcgagcgtcagtcgagtcccggcgatccggttgagttctccctcgtaagcctgcttctgtcgaagtgcagcgagggccactgtggtgatagtaaacagttagaaaacaagcacgaggtcaagagagaaaggggatcagcgtgatggattgagctgataagatcctttcaacccgacaggcgacaacacctgtcccctggcgactcacgtcgtttattagccgtggcattcgtcttggccttcttcaactcctcttcgatctttttctgaagaaactcttcgcgtttatcgaggacgagcagttgtgaccgaagaccaacgatgctatcacgggcggattgacggctatccttgggcttgccggtaaagtaagacatccaccctgacatgatgaatgaggcgatgtgtgatgataagcaataaaggaacaagtcgagcggttcggctcgggacggtaagagctgtttgtttgtagtcaggatcgaggtgtaattgttggtgatcgagattgaagatgtgatagctatcaacactagcaacactactctcgccgacctcgaacgtcattacgactacgacactactgacggtcgagtctcgcctccggagttgattgattgaccgaacctgacatttctcgacaagaaatacttccgaagcccatcttacgacaacaacaccatcggaagtaaatatagtcatcggggagggagagtacggcgcctactttggtggctatgttcaaaagagctcacacttattctctacacgaatcatgatggactgaccaatatcaacgtttcgtgcctacaagcagctcgtcagatcgttagtatcagccatgtccagacaatactctcgctattctcagccggtataccagccagcctcgcctggtggttaccaagatgatcaccccgcgtcatcgtcgcccccgcctcatcatgctcatcaacagggataccatcagcaacaaacgaaccatgctagccgctacgatcccgatccccatgagtacgacaatcctttccacacatcagaagctcggtatgaagatcacctagattcaaatcgaggttactcggatgaccaattcaacgtggcctctgatttcaacaatcaggggccgaggtatggagagctttatggtgggcagagccggcaggagatggcccagctcgcagcgggagcgcgaccaacgagcttgtgagtacaagatgatcatgttctacttccggatgaattatcgttgttcatagcggtaaactgatcaattccgctggtatgcatcacaaggtacaatcccctcgcaccgacgacctctcacatggacgagcagagtctctactctaactcgggcatgacaaaggcgagcgggggtatgaagaagcctcttttggggaatacgaacggcggaggaggacagggagagaccgtcgagcttgtgaccgtacctgcgttgggagccgagtaagcttcccatcgacccgctcgctgtccctccctttcatcccgtcataccgctgaaggtccggttacgacctcccaaccagatggtcgaaaaatgaactatactcgcagacacggagggcgaaacaagaggcgcgaagagagaaaaggggcaagatgtggagggagtggaatcgggatcaacgcggttgttgtggagttgggtggatgaccaagaggatgctcgtcgtcgtcacatttgcctttatcgccgcgtaagtcgccgctcttttcacctacctgatatgcttgttcagacgagcgtccgctgatcctacttgaccgacatcatctgtcgatatggactgctgcaatcgtgaatataggcttggtgtgacattgtactttgtcataccgagagctcccagctttgatttcccctcggatactgtcttcctggccgataattcgactgtagggttctcaaggacgcctgccaacttttcatttacgggcgatatccggatgattggcaagtcccgcttgagatcttcgctacatggctggatccagctcatattcgctgaccgatcggtaacccggcgtgacactccagccgacgcttctagttcctggttgcccgtccacttcaacgatctcgagataaccgtgctcgatatgaataccaataaaaagatcgggacgggccattggaaagacaaaacgatcgggcggaaggatccggcttacctgactttgccggtggatttcagctactcggccgtgaacgcaacggattccacatgtgagtccgccaacggtcaatacgagctctttccgatatgggcgacctcagctgagatcgcggacggcgtagggtctggcatgtacaatgcgtgtggacaccggtggacaggtacacaaagaccgggtgagttattctggtcgatgcgaacagacaaagaggcttattcgctacaccgcacgcatgatagatctctcattccgagtcacgctcaagatgaatattcgtggattggtcggaaagccgaccgtctcgaggttggcgaccgatctcgaatgtcctttcgaattaccctcgaacagcgtttgaaggttttgtgaatgaacaactgatcttaacagttgcgtaatctgcgtgagatattacaacatatataacggacagcatgtcatcgttatcggcatcacggtggtcagataaccaccacttggttcagcggtgggatccgctgagaatcacgtgactgtgctagatagaacattgacacggtttaaatggacggatccctccaaatagcgaaaccaggagaactctcgcggctctcgagtgaatgcctccgcggggtctggatgtgattcgtgacatcgctcgacgcgattggaggcgccaccgtcccgacaacgatcttcgcaacttcctcgtcaaacgataggatggtctccgtgtcatcggatgccatcctgtatcgattgctcgagacgacctcgattaaaccatcgcggtgaaccacggtctgctgtcctgcgtctgagactgtcttgatcatttcgggttggacattgcgacgttgtttcggtttcggacggtcatccttaatctttgcagtgagatgacaaaccggcaacgcagactgtcgtaatttgactctcagaatttgcaaatgccactacgccatatggaagaaatcagcggttgactgaccatttgagcccttacggtgtcgagtgcacgatgggattcccgcgggtcggtcgtcttgctcgtctcactgcagactgtgcgttttgcggatttcgtcgcttccgttccaggctctaccgtcggagtatctaaggatagactgctgggattgaggtccacggaggacgatcgagcggccgcttctagagcgtcaatatcgattcccgcggctgccctaggagcagaaagtggcagcgacgtgatcgattcctgggaaggctttcgattctcatcgtggctggcggtagactgggacgagatgataccgggaacgtgacgagcttgccatacaggccatacagcggtcggaccgatgttggcgtattgttgtggctcaatgagcctcgacagatgttcatgttcgcgatcttcgacgagcgagggcatcaggacgtcttcggcttcgtaacaggacactgggctgacatcgagcgccccacgcgtgtcggacggcggaagccacagtatggtctcaggagggctctcctcttgtatgaccgacatggtcggttggtaagacataccgatcgccttgcgtgcataatccggaaggacctgggtacgaacatgaggctgactatagggcagtacagccatcgcatcgcggcgttcgaagggggtctgtagcgttcgagaagagttctgagatcgattatcatcttccatcgagtacagaggtcctgggtgtttgaagaatgccggcgaggcggatgatcgaggtcgagcgattgtcatggaagacacaaaagaacgtcctccccgacctggtcgattctctggaatatattcggcattggcgcgactacttagaggtccgaacgaggcgatccgctttgggaccggagatgaggccggcccacagtgaacgtggaaaggtgatggattcctttgcggagaagtcgaaggcgaaagggggaacaatgtcgggtcgggtttgtgatatcgggtcagaattgggcgcaacgtcgaactcgggcgttcgaacgggataggggtcgagaactgattggtgaggggatgaggaggcgaagcgtagcgaatcttcttgtagcgggcttgatcgtgattgtcgacgtcgaaaactccttcatcatcctcagacctcattcgtttgacgccgctgttaggctggtgtgagcgcaagatcaatcagaaggtattccctcgagtcattaattgccctttggttcgacataggcgtacgatcaaaatcttcgtttgaggatgtccctgatctttctcctctgaaccgagaggatcgtctgttgttcctgttttctgatcgtgtttgtcgagggctttacggagttgggcgccatagagctttgggtaaggatcatccgttttgttccaaacacgatccctttgcactccttggggaccgtcgcggctaggaagcttgttcaggttcgaaagcgccgaagacctgcctggaagcttcacatcatcaaccgcttctccccgtttgcgtctgtacgagtagatcaagaaaagtgagactccactcgggacttatcgcctcctccagagtgttactctccacgcacgctttagcttgagcgttcgctgcagatagactgtacttgattggcctcgatgttcccgtccgagtggagtaccgcatcgtcgagccgagagtggacgccctacacctacgacggatgccggatgaagccgaaacgtcacgctttgatgccgatgaatcgcagagatgtaacgacaggtcagttcaggttcaaagcggttcttggactagtgtggctcactagagatattcaaattcatccagagaggcaccttgtaggtgtcccaatcagaagacgtacttttgaggagccccatagcgtcaacgactatactcgtacatgtcaatgaatttccagacctgtcaagatgggggggcgtagttgcgttgcgcgagttgatcgatcccgaagattcgtttccggatttagctcgcaaagaatccgggggcagacgtattcacaaatagagctgaccagcatgaccagactcaccttgtaactggaactctcgtctgattctgatcagcacaatgccgtctagcttctccctggcaatcattgggggtgttagatttgttcttaccttcaaggccatcatcgtgttcgttgtgcggtagcggctcgccctacgacaaagtctgaccttgaagaaagtggaatacatcgccctgccaatagccagttgaaaaaaatatcacttaactaccggacatacaggcacctgagcatctggaagtgatcggagcaagaggtcaactaagacagacaaaaagcatgctcttacaagtcctggctgaatatgctgtgctcgtgccggcctcgatgttcggagttttggcccgactgggcttgaacgccgtctcaaattgtacgcgccctttccgacctcggaagcctgtcctgatcgctgaatgcttttgtcacgattgataagatcctgcacaagtcgtcttctctctcgcatgggctcagggagtaggctgtgcgattaagggctccgctttggcgtggaaatcaccactgtccacaatgtcagtccacgattccctgcgctgagaccgcaagtctctgacgatcgcctactagataccctccgctctaccccgcgataatcacaggtcagctggagtttccgataccgtgactggccgttcacatgatctgaagcgctacattcggctccctggctaggtttggctggatcgatcacaacgttctcatcctggatgctaggaggctacagtgcctttgcgaacctggaaggacctaggagaagtcggcttcacaacgtgagctcacctgttgcgccagcgctgcgctatggaggccaccgctgatggtctcccgatcgctaccaaagactgtagatggcctggcttacaatgtggtgacccttgccatcgcattagcggctctgaacttcggcgggcattgtgctcgcaagataagtgcatcggctgacaaggtgtccgcaatatcagacaccaagaaggcgacatccgacagctcggatgactcgtacgctcgacgtcatttgatcctattccatacggtcagcatcattctcgggactctgttctacgtcggggcgatactgctctatctgctcggaccccggtcgtggaggcatccggttactttttcgcttctcctgggacccccgggcactatgctacgctacgccctcagcaagctgaattccaagtctagattcgagggcaaatttccaattggaacttttttggccaacatgctggctaccgctgttctggcagccgtctatgtcggacaacgagctcctggaaaaggtagtcaatctccgaacctgaccgtcacgggatgcgacgcattgtacgcgttggaaggggggttctgcggatgcctgagtacggttagcacgtttgctgtcgaattgaccagcatcagacgggcgagatggaagtggttctacgccggaacgagtgttgtggtcggccatctcatcgtcttggcggtagtcggtggagtgagctggtccccagcgggactcgggccacagtgtataggtacgcgttagacgttgtcgtactactagatggcctctaggagttccactagcgaacaacccatactttgcttctcgcactgacatcgtaagtcctcccgtcaatattcgaatcgaggtctgcccgagctgaacatgatcgtttgcggatctcagatgtctcagagctgcaaccgggtttagctttttggaagtgggggtcgcatccgcccagtacacacggctcatacaaatataatgatatctttaatacaatccttgtgctggatctattccgtcatcggcgactgagaaccacaggttcctgggtggtctcggtcggctctgctgtggcgtcgaaacatgccgagggcgtagttcgatcgatgcttcggactctgcgtcgatgctcgtcctgctcacaggccgggaatcccagctcatatccaaagacggccgtgaagagctggtgctgatgcggggctccgaaccgagagaccggtcgagctgattgatcgatgtgcttcgtcgcacagccggcctcatcgattcttgactctttcgaggaagagtctgcttaccgccttggagcgcggcaggtaaaactcttttgacagtgacgacctcccccgggggatctgtgtgtggtggtgggtccgagtctatccgtatcaaagggggtgctactgaccgctctttttgacggtaatgtccccttggtatgatggtggcttgaccactttcaggccctcgaaccacattgccccgaaggcaagcatccagaggtactagtagctcggtccgtagatgtatagagtctgaagaccacagcttgttggcttttcttagcgttccgacctgaagtgtggttaccacgatcaatgtcgtattgcgcatcgcaacgacgccaagcaagacggacctcgattccatattttagtgctaccgccatgactgaatccgttggtgtgatctgatggataacgatcagcgaaatgagccagaatgatcgtgtgttgcctgggtgcgatttgtctgaaactgaccttgtgcacgatgacctcgatcatatcgaccgctcttcctttccctttgacgtccacttcacttcctccatctgccagtggactgcctctttgtgaggcggcagcatcagccacctctttctccaggacgtcagtcagtctgctcagactaggacggctctgcgtctggtgtatgggccgtgggacgtggaccccattttgggtccggctggacgatgggtccaaagggtgttcggaaggtaccgcatcaaacattgacgaccagccgttcataatgaagggcgaagccgtgccaaatcagactcggcctatgattcgttccttgggggcatgagctatgggatgccagcaatattgacctggtcaggcagggcatgcccgggcagtagagagctgcagacttgtggaataggtacgccgctctataccggtcctgcctgtcaatgaccaattgcaacagctactgaattccgtctgaagagatcgatgcagcgatccggctattctgtatggtttgatgttactgctgtttccaacccggaggatctaggtcgatgaacatgatcaaacccttggcccgtttgtcagttcaatcaaccccaccttccttgccaggcggatgtggccgcctagtctcgttcgcttacggcatgacggcttcaaaggaaaacgcaacccagtgccactcgacacggagccccaggggttcttggttacagaaccaagacgtttcatgtgtcgttggtccccggtatcctgaatcctactatggcgctacagctggtctagtctgtccaagcgagcgcatatcactcgacagtctcgcagccaaggcagctaccaagaattcggactagactctgtttttcctcatcaatccgccacgaacaaatgcaggcgtataacactcaacccgacatgccgaatcgtatcagccgattcagagaacacctgcctgaaccggacgatttggattcggagacaggattcgaagctccggcagtcgcgctcgaggaattgccattctgcgcagacactgcatctcgcagaccctcgatgagcagtatccgctcgtatggacgtcgactcggatgttcggtgagaagacgattgcacaagatattcacctcggctctcacttgaagtccgcgccgtccgccactatcaatccgccaaagtcgatgctatgtctatatgcagtcgaatgcatcctctccacgtcgtccgcagtctgtcattacaagaacctttacagttgtcgttaaatatctctcgtcctactcttctcgatcaatcccttgacatgaccagtcttgacgtagaacaaacgcacggcttgccacaggtccgggctcatatcccgctccagcatgatcgtgaccagggggtaaagctggggcaggtatctctcaaactaatctgggcatgtgtcagcgtcctgccagatgccaagcatcgatatattctgcactcacgctttcctcctcgaagtcacggcatccttgcagaatctcagtcacgactggggtccacgcggcgatgttcctgggttgggctaccgggtcgatcgcgttgaagtcccgcatgatccgaatgcccaatctgcgtagaccaatcctgatcagcgcggcagatatgaatgagataccacgatctctgaacctacggaatgaactgttccaataccccttgtctactggcttgatggtcgggtcgggggtcgcggtacattcgcaacaagacgttcacaagagtggcagcactgctcgattcttgcttgagcagatttggcaactgcttcatgaagcctatttcgttcgatggcctggttaggatggataatggtgaaggaaaggcccgattcctacttaccgactttccacaacgccatccgaagatctttgtcggcgttgaacttccgagcgaattcgtagctgtcatccagagcggtcatgaagcgtaaaagatgctttgcaggaatggtattgtagacatcgtcgttctgcaagagctcatgcgtcgtttcgatcaggagcaattgtaaaacacatttcacaatgatttgctggaaaatccgtcgccgggcagaggctgtgagcggtccgagtttctccggagcatcactgaaggttgctagcgagactgaggtattggtacaggtcagtttgacgaacccaacgagctgtgcaagcagcaaatgctgaccttgtgcggcagcctcgccaccatcttccggtaatgtcgtttccgctcgaagtgtttcgtcaaacaattgtcgcgctgtcgtggtcgaaaacagctggatgaaagtgccgactactagctcccatttttctggactgagcttcttgacattgtcctccaagagctgctggaagcatgcggtaccgattcgcgcaagagtatcgttctctgcagaggccgtgtatcttgatcagccgatgtgtctggccgaggaaggcccgacgatctcaccttgacagatacatgcacatagcaagtctagcaggccttccaggaaagcttgcaaggtctcgaagtagaccgtgaagagctcaatgaggcttcggagtgctgagatgagcgtcgtcgacagccacacgctcattgcctcctgagacgcaaagcgagatatgtcttgcttagaccgcaatactccaaagatagggaacagcacctcgtcgcaaatccgtttccaaaagtcaagcttgaaattggctccatgttgtttgagcactccaaagagagaatccagagccctgtcatggagaactcgaacccctttcagcttcagcacaactcatggtaaagaggtcaaaccagaatgaactgacattctccgcacttcgagatcctccccagtcatgatgatatcgcaaaagcttagcagcactggcagccaatactgaggcgtgggatcctcggattcggtcaaatccgaatccgcatcttttgatggtttcgatggagattcgctgagtagcttgggcacaaggccctgaaccatgtggatggcctgcaagctgaccttctggaatttcgtgactttgctgaagtctgtcaagcaagttgtaaaatcgcttattgaaccgtagcgtagtaccagctcgaattggtcccggtagatggatgtaaccaactcgaaggcatatgtcacgacgcgttctgattgtcaaacgagatgagctcagagtcaggaaaccgatgaagctgttgtctcacctgtcataacgcgcgaagcagcagagtagacccggaacatggtctgccaaccagaacgcagattattgacacgcgcctgtagcatctgttggaggcattgcagaacctgccgaaaagagccacgcttccgtcaactgaatcgaaccttgatgaacctcggctgcaacgtaccatctcccgagcatccgcgttctgattcatcgtcatggtgtactcgaatggtctcaaaaagtccttttggaagcggaaatgggccaattcttccttctccaagaaccgcatcgacagttgtctcaaggcatcaagaccgaagaagctgacattggggttgttgtggcagcagacctgtgtgcgaagatggcgtcttagcgaccatgggaagagcaaggaacttcaaaatattccgctcgcgactgacctggttgaagtgtacacccaaaatcgcccaaatacctgaccattcgagacggatccggtccatgttgtaataagcgatatcaaccagcttttgcaatgagaacaaccggggctgggctgccgagctggaagactgaatctcttcccaggatacctcgcttaaacccttcacaaaatctacaatagcaggctatcggtgatccgaatgtcagagctcggacttcgcgtctcttgcagatgagcagtacttactcctgacaacttcctactcagcgagaaaaccatgtcagcagccaccgtcacttgcgtcgagcgaccctcctctgcgacatcgccagtgggaccctttctcttcggtaccgctgttttcgtagactgggtcgagctgagggcgtcttggatgtcaggttgactccaggttgtaccttgtaaagtctgctcaccttcgacgattcaattccggcacatcgatcccgctagagatgagctgcatgcgctcgagctggctgacacaggtcaagacgtctcgccatgatcccttgaggcggtctccatcggaaattgctatgtctaacagtgctttcaccgcttcaatatgtttcggtttcatctctgcgagattgtttagcagcgtaaactttgatagggtcgagacaaaggcgtttcgctccagttccaggtcgaacatcccggctaccttgatcgcctgtttgaagccatcaagacagatgacgaccacgttcatgtcgtcactctcttgcatgggagccgagatggctgccaagaatggcatccaagccacctcgaacatgggtttgacgtgctccagatgcgacgcgctgtagaaaaagtcgcctccctttgctccccgtcgctgagacttgaccagcgatttgaagagggcttccgtcttgttcaccatgccctcagattgcaggacgtatgcttcacgttgaagatcgcgaccgacgtttgcaatggtcgacgcaagtcccgtagcctgcgggggaggtgccagctcgatctcatccttcatcttgatttcgtttttctgtatctcgtcatagatctcggcgagtaactcttcgggcaggtcttgcccatcattgatacctcgattgttcttgacgaactcggctttggtcatccgcttagattttaggtttgggttatgagcgtccgtgttgagcatgatcacggaaaaggcgagaatgtacgcggtgtcggcgttggcgaacactgtcgacgggttgtttgcaatgtatcgctcggcaaatttgaggacgaaacggtcgattttctgtgcttcccctggcaagcggaaggtttgtaggtactgccgtacagcgtccgtgaatttagctcctgtgaaatcgatcatgtcgacaaacgcgtgcatgaccgcaatgttgccaggatcactgatatacacacgagaaggataagctaggcatggcacagcggaaacacgcgtggacgcacccatcgcccaagtattctccgatttgagccttgcttaggccttcagtgtgcagcaggaagtgggcgatactttccggcctctcgtcagcgatgaagccgtgttgaagcatgtattgaatgccctgcgataagcggacataatgtaagcatctccagaatatgagggatctcgatatcccgctcacccttttgggcttgaagttgaaatcgcggattccttccatgagagatgtcttttgctggcgagctgatgcgaaccgttcgggatcgtccttgatctgagcgtccgacaatccaaaagctccgaccgaggcgacgctgagacgatggtctgaatgagaaggtcgcatcgccttgtcaccagactcgacattgtcctcgacctgaggtggccgcatgatgtttgtccattccactagggaacgcaatatggcaatgaccccgtcgagcgcttgcctacggactcgttgctcggatccgaaacccgcatatctggccgtgatctttgaatctcccaccggcgatatcgatgccaactgtgcagtttgagcagacatgaacgttgccagcttggaatcggtcgagccttcctcggcttttgattgcagggggaaatgtgcttgtccaagtcgaccgatcacattgacgagtcgctcgtagatgttctccaccgaggaccgatcgcagtcatagttgatgtaaatgtccaccagcgcctgggggtcctggcataaacgcaggtaggtcgagagcaaggacgatttctgacgtagggttgcgtgccgcatttccaggatgggaatataaatctcattgaacaaaacctcgatctctttctgtgaagttcgggggcacgacttagcacaagcaagaacatcgagcgagaaaatctcggcgattcttctcaccttcaactgagatcggaggtttttcagcatgcaccaaaagatctcggtgctgaggtcgaacacctggttgacagaggacagcgcgttcctgctgattcccaggcagagatattgcttggtagccaggagaaagggagtatcctctgatgacgaagaagagggcacgacaatggacgggtcggcaaacacatccgagtgagattgcaagatcgccaagacgagatgtagcgagagcaatttggaccgcatatcgtgtgatcgagggtctttctcgctacgaaccaaacacgtgcacaaacgaatcagccgcgaccttgtccttcaacatccgcttgcgatcaccgtacgaacctctcgctgagcaacggcttcattgtgagtttgcaaagcgccctcaagaccaaaaaggcgtccttgacataaagctgatcgagcgtcagatccctcgtctgtgtgtcttcatgcatctgtaaatcggggttgagctcttgactcgcttgagggaggccgttcgtgaccggttctggaccgtccgcagaggcttccagcgggatatcgtcgttcgggttgggtgccgagaaagaatctctacatggaaaagaagaagagaaaagttgctcgacgtcaaggtcagtcgatcgttctcgtacggctcatcagttcggtgtgacgaacagtgtcaggttctttttctcctctgctggcgtttccgctcgactgtccgccatgccgtcccgtcgtggcgtctgctctcctcccgtctctgaccgttcctccgcctcgcgctctctggcattcagaccgggggtgacgctcccactcctgccgtgcgccatcacgggcgtcccgatggccgacttgttatcgttcctcttgatcctgccgaagatgtggtggatcatctgtgtcaagctaccttgggctacgagctgcgtcgtcgggtccgagctcaaaaggtagacgttgtagaccgtcctcacggccttgagcaaactcgactgatgtaccgtcaacgtgttcgagaggacgagcgcgaggagcgatttgacgacctgaaccgaaacggccgaggatgaggattcggtaaacgaggtggtgatgatgtgggtgatgatatccgccaacgagggtccatcccgtgtggcgtccgactcgtcgctgaaaaagccgtgtgagacgagtttggcgatcaggtcgagcgcgggggtgacgagccgatcgacctggagttcgcaggcgagtttcagcggttcgaggatatcccgcgggacggccgacgagccttcgagttgacactgatccaaggcgcgttgagaggcttgtaacagggccggcgagcgtttggcttcttttgactgggcaattgtctcgagtcctggcttgatgagcgcgagggagaggtggggaacagaagagagcgaggtgcgggacgccgtggctggggtgcctgcacggtagatgctgccatctccgggtgtaacgctgatggagggatgggtgcggtgcggcagagtgttcaagctgctcacagaggcagagggattgtgggtgctgagcgtttcgttcttctcagggacgggtggaggtgaagccgcatcctctcgcccgggcgagacgttgtccaaggtcggatcgccgttcacctgttgcgtcgattccgacagttcgacgtcctgcatttcagcgtttgagccgtcccgatcgtctgccagctcctccatctcctgttgctcatctgaaataacgggaaccggacgttcgacggtctcttgcaccacctcgtctcgcgccatggaaggttcagtctcggatacgtccggccgtcccacccggctatcctcgagcgaaacgtcctccatcgtctcgttgtcgttcatgtctgacatgacttttcaagtgctagaatttcttctgcgcttgcgtgtagcgtgtagatctcgagacggcgagctcgactttatctcatgccttttgtcgagctttgcgcggcagacgtgtcaaacgctgtgtaggcccgggagtcgatctaggatcgtgtgcgaaagggacagtcttggatgcgagaccttacgttttgggtgccagatgtctctatggtgtggttcgtgtatagccgactttcgatatggttcaacaaggttggtgtaagcttccgggaatgctgtcgaaccacgacgataacatgtcgagctgaggttattgctcatgttacccccctcggcggcctcaaaggtgatgtccatcgaaaacgcataagatgaacagaaattggcgatttgatgcgttttcaactttctactctgacccgaatgccagcaaccgccagcacccagcaccacctcacccaacatacaacaattacctacactattcgaggaccagtcgactgtcgaatcacacgacctacttttgacatcatcgagatacctcagtaatccatcgtggtcatacctcttcactccttgctattcgagaaacgatcccaccaacacagtctttggtactcggccctctcgatatatccacgtcggtctagcccttttctgctcttgtcaccggtccccgcgcaacccgctacacctatacggaacatcttcgtcgtctctgcaacgtcactcgacattatcaaacatggccaccctctctgctgctgaactccaaagggtaagtagaccggtcgccgttcgctcgagccgtcgttgctgacgcttatgtcccaatttcgaccacagagacacggtctcgaaggagcacccgacccattccccagcatggctgcccaggctgctcctaccaagaactctgctaacggatctgccactcccgtcgataccggttccgaggaagctttccccgccctcggaggtccatcccctgccgcttcggcccccaagccttccatgtggtcctcggcctcctccaagatcaaggctcgcgctcccgcacagtccgctcccggaggtctcggtaggaccggaggacccagctcgtccacgctcccggcctctgtttcgttctcgctcccgatcgccagcatcaccttgacccccaaggccttttcggaactcaccaaaaaggtccaggagcagtacggatgtaccatcgaggcttccacccagatgcgagccggcctcaagacctttttcgttcgaggtcccgatgacaaaaaggtctcgtccgctcgaaagctgatcgagcgtggagtgagcaaggtcgagacttcgaccttggatgtgcctctgtccaccttgggtaccatcatcggacccaagggttcgaccttgaagacggtcaccgacgctactggctgcaagatcgatatcccccgtcgtgagaacctgcccaccgcaaccgcgcgagctgccgctaccaacggcgacgaggccgattcggacgacgacgaggaacccgaggacccttcggttcccatctcgctcaccggtcccacccccgccatcgccgaagccaagtcgaggatcctcgcgctcatccacgacaaggtctcgcacacctcggtcaagatcaaggatatcccttcagacttttatcccttcatctcgggacctcagggttccaaggccagggagttggaaaacaccgtcggtgaaggacaggttcagattcacgtccctccccctagcgtatggaggtctctggaaaagcaggccgacgccgccgagttgagcggagacgccgacgaatcgacgagggagaagaagcgcgacctcagcattcgcgttcagggtgaccgggaaaaggtcgcggccgtcgtcgacgagatcaagaggcgatacgccgacattcgcgagtcgagccagacgctctccatctcgattcccaagagacagcatcgattcctcgtcggtcatgctgccgatgagatcctcgaacagaccggatgtatcgtcgatttgccccccatcgaggactcggccgacgagtgcattatccgtggacccgccgaaaacctcgccccggcattgaccctcgtcatctccaaggccaacgccatctcggtcggaaccgtcgatctcgtcgctcaacacaggagcgctacctcggaccccctgagccacgccaagaccgtcctgcggtacctgttgaggacgtcaaagctccgacagatcgccgacgctcattccggcgtcaaggtgtaccctcccttccaagcggccgtcgaagctgccgggaccgttgtcatcgagattgtcggcgccgacaagcaagagacgaacaaggccaaggaggaagtcaccgctgccgtcaaggccatcactccggcccacgtcaagcctgtcgatatcgatttcgccgttcacaaatttttgatcggcaagaagggtgccaagtgagtctcgctcgtcgcccttacgtccttgtgaggtgatcatgttgctgatcatgtcatgacgacgataggatcggacagttcgagtctgctcataatgtccgagccgtcttccctcccgcttcggacgagtcttccgccgtcttgcttgtctttgagggcgacgaggccagcttgcccaaggacaagaagcagaaagaggccaagctcgctgaatcgcttaccaaggctgcttctgccatcactgacttggccaaggaggccgccgatgtcaagaccgagactttggacattgaccaggtgagccggcctgcgcacagacctgatactgtccaacttgttgagcatcgtgacgcatgtagaaatggcacaggcacattatcggacctggaggtagcgtccttcgagctcttttgggtgaagaccaactcgctaccgtcactgtcggcagcaaggactcgtcggcccctcaagacatcgtggtcgttcgtggtcctagcaccgaagtcgatcgattggtccctgccatcttgcaggtcgtcgaggattccaagaacgacgacttgatcaacggattcactcaagagttcaccgtcgacaagcgccacgttcctcacttggttggatcttcgggatccgccattaacaagctgcgagaatcattgtccgtccgtatcaactttgacgacgacgagtctgccgccaaaaagtctagcaagaatgctgtcgtgcactgcaagatcatcggccgaaaggaggccgtcgaagaagccaagaagcgattgttggcacaggtcgagcgactcgaggacgagacgaccgaggtcctcaacatcaaaaagactttgcaccctgctttgatcggagccagcggtaaatacgccatcaggctcgaggaaaagtacgccgtcaagatcacctttccccgagatggcaaggacggcgaagaggccagggccggtcttaagcccgacgaggtccaggttcgtggaggaaagaagggtgtcgctggtgccaaggccgagctattggaagccgccgagtttgaaaaggagtccaaccagtctgcttcctttaccgtccccaccagcgcgatcgcccgaatcctcggaaagggagggaacaccatcaacagcatcaaggatgacactggcgctcagatcgacgtcgacaagacctcggacgagcagaccaccgtcaccgtccgtggtgacaagaaggctatcgccgctgccaaggctagtattcagtccatcgctgccgaggttgccgatcgagccgacgagtcgatcgcgatcgaccccaaatacgtgagtgcattctggttggcagcagtctattgtacatctcgtctaaagagccgtctctcgatgcacagcaccgcaacctgattggtcctggtggacagcgactgcgcgacttggtcatcaaggtcggaggcacggaggagcagtcaaggcaagctggtctcatcaacttccctcgtgctggcgactcggctcccgatgtcgttcgattgcgaggagaaaaggaactcgttgccaagctcaaggccgagctggagcgcaccgtcgaggctctgcagaaccaggtcgtcctcggtgtcgccgtcccggcctctcagcacgccatcaagattggtcggggcggttcggctttgcaggacctgcaaaagaagagcggcgctacgtaagtacaaggacaaccattgctcattgcgacgcggtctgaccggttcatctgttctccttgaaacagtattcagttccctggttcgcgtcaatacaactcggcgggtgaacccgaaaatgccggcgaattgtcagaggttgcccctaacgagctggtcaaagttatcggaacacgcgaggcctgccaacaagccattgaagcgctgtcgactgcatccgagactcctcgatcacgcacccccgtcggcaggaacggtggcggatcttccagcactcgtgccgtttctgttcccgcgaagtacttccacgcccttaccgaccagggcttcctcgcccgacagcttcgacaatcgggaatccagctcgatttgccttccaacgctcctgccaagcccgaggctcgtcgacccgctgttcctgccaacgagcctggcgcgaagacggctcgtatcgatgaagaccaagacgaagctggcgatggagctatcaactatgctttcgaggagtatgatgctttcgaaggcttcccggacgaggatctcgacttcaacttgcgtggacgggaggagctcttggagcggggcgagaacagtaagtccaacgaacgcacgactcgagcgcacccggctgatcgaagcttgcgctgctcgcaaacagtcgtcaaatcgatgatcgaaaaggtctcggccgctaacaagatcggagtcttggccgggatccccaggagcgctttcccccgaatcatcggttcaaagtcagtctagtctcccttatagtcgttgagatccacctcttaacgcccatctctattctcgcaggggtgcaaccatcgctcgacttagggctgaaactggagccgagattcaagtcggcaaggaggacgactttatcaccttgaccggaggtgagtagcatatattggcactcgaagaccgcagcgttttcgcaatctgacataacgtattacagattcggaggccgtcggcttcgctagagacgcgattatcagtatcgcctcgcgccgcggacaacgtttctagacacacaaccataatgtaattacaccctcttgtcattgattgtgaatgcatcgtatgcatggctcgtatctgtgtgcgcgctctccgttggcgtaacgcttagcacttcacacgagcgagataggaggactatcaggctcagtaatccagtacggcgcgccgacggtacggggcgtgaccggctcgtcgatgttggagagccaaatcggatcggaactggaacctttgcgggtatcgtcggaatcggtctgtttggaggccgcaggctgatgctgcacttgggcgacattgagagcgacccagacggcggaaccttcgaagatgaccttgacgataccgctcttttgggctgcaaggacatagtccttgtagcacgtgaatccggctcggcgatattcactggcaccgagtcgctgaccgacttgaccggcttcgtggtagcgatactcgagatgatccttattcagcccgatcaggaccgcatacagcggcctgaactggcgcaacgccctgcagggggaaggagggaagcgacatgagcatcacctctttctctcaagctcgagcttaatctgattcatacttcttgatgtcggacccgactgctttcggcggcacagagacgagtcgagggtgaggcggttcaggaaggacgacgacccgatccgagaccagagcaggcggcgggttagggcgagcggaaacaggtgcgcgcacgggggctttcaggtcgagaggcggcttgacgggcatggcttgcttggagatttcagctccaaccttgattcgatccgactgcccgagacaatgcttgactagatctgtagggatttgcgcgccaaggtaaagtcatgcgcgaacgacagcgggacgagcgatggcttaccgtacgccgttctgggcggcgcaagcggcttgcgaactgtctctcgagccttttcgatgctcttgtccacctgaaccgagaccttgacttcatctatcaaagggctttggacaagtgccgtggagatgacttccaggtcctcttcctcgaatcccttcggcatcaggagcgtgccgacatcgaccatttcgaatccgccccgcctcttcctggtctcttcgtactcttcaaggtcgtcgatatcttccggatccgcggcttgctgggctagcaacttgaggcgagtccgattcgccgaattgaaacatccgtatgtcttttcgtcgcaggaagcgacgtaacagtatcgagcgggattacgctcgaaccaattctgggcggtcactgatgggttttacgatagggagatgtgagtgtcacgtgccgacggccaccagagctctgactcaccggccaatttccaagcaaggcccgtcgtattgtcgtcaaagacacgtacgagcttgacgttgatagcatccgtgacccccttgagaaactccttcatcttccgggcctgctggccattcccctcggcgaaattctcagagacgaagagttcgaaacaagtccaaatttctttggcatcgtcatcctttcgtgtctcggcgtaattggcctcgatctgtcgggtgagattgtcgaccaacttcttgccgccttcgcgtccttgttcgactagctctgggtcaaacttgggtcataagaacgtgcatttgttaggcgtgggctcttttgaaatctagcactttgcacctcacgtacggccacgctagtacagtcgatcaggacgagtgcaggaccctggtcttcggcttcgtcgggtcctttgacgccctttttcgccgtgtcccatggtagagatgatcgctgtgcgatcgttgccagcttttggagttccgaaatggcctgtgtgtgcttcttttggtagctctgcagctgctcgatattttcgagcagctagacgacgggcccatgatcagccacgtttccatggggcagaaagttcgggagacggactcgcctgcgtcatgttgggagggctcaacgcccaatgaggtataaaatcactcgcggagtgaagatccaaaggaatgagagaagagaccgatgcgtccatgaggtcgatggtgagaggcattgaatagctaaaggcgatgatgaccgtccagggacaacggcttgcgtggacggaagaggatgaggcgtcggtggctcacggcgaagttgaacggggggagagatatggcttcagacaggtagcttgtcacgaacgtacagacactagctatacactcgagaatgacatgatccaatcggtagcaacggacgatgtcgatggcgaccctggtagactagaccgctagaccagggtcgcccttgacgaattcgatcaatcggtttgttttgatcgatcaagaggtgtaaaacacactttgagggataaatcaaaggactcgctcatcgtgatcgggctgtgcctgccctgccgctcccgtgcgcaaactcatcaatcaacagaaacagaattcccatcagattgatcgtcgtcgtccccgttcctgatctgaaacgcgcgcgagtttgttgtcgagtgcaaacgcaattcagcaaatatcctcccgagaatagaagccaagtcgctgatccctgcggtgttgaagacctgggaggagacgaaacagttggattccacattcggtatacggtctcttcaatcactcagagcagcacttgtgagcagccgattgatctggtggggaaaacgttgccgcagtctttgggccgtctctaccttacaagctatagctctctctgctccgagttacggtatcccgctctgtcaacaaggttcagacggcctaattcgtcaaaacaggcctaaacatggactcatccgttcgaaggagagaccgtaaggtgagagccaccggaagccacacaccgtccgtgtctaagcgtgtcgaatacgatccacgccgtgatcgcaggatcgggagggcgtgactaactcgttcatcgtccaggctctgctacgaggacatcatcacagaccggccaacggacgtttcatcatccccaatgtaactcgatttgaattccatttgttctcacacggtcccgagtcgaggctcggaccgagcgtatgatgtttggctactacaaagaaagatgcatacaacccgctaaagcgggtgactgaaaagtgcgcttcttggacgtgggaagaaaactttacaagctagcagcctcgtcaccggtgatggtcctgagggcgccgggagtagcgaccttgccagtgacggcgctggtgaggacctcggcggcctgggtgatgagggattccttttgggcaaagtatcggatctggccatcggacgcaaagagggtcagtcactagttccgtcgtgtcagtggccaagtcgggccatgctcacctcggcaggcttgacgatcaagaccgagacacggggatcgttggaagttccatcgtggacgccatcgcccaaatcaccaaaccaagccttggtggcagggctaaagtacttcttgacggtctccctgtcggtcgaggtgttggcctttccggcgatcgagatccagtctcccttggtaggctcgaggaaggagacgttgacgtgagagtccttcttgacctcctcgtccttgtggctcgagttgtcgtagatgaagacgggctggagcttgtcagtggaagcgggtcgcatggctcgcgagtgctgcggcgtcatgggggacatcaggtcagcatcggctatgatgatgcgtactcggagattcggcttttacccaccaaagatccgtcaactccgacagtggtcaagctgcaggttccgacctttttcatgatggcctcgacctcggcgacacggtcctgcaaagaaggggtctggtcctcggacttcttggagtatctaagtgatggaaaagtaggcgggtcaagtcagtcagatgcaaccgggtatatcggttgacgatccaggatccctccacgtactgatcgtcggcggccattctgatggaagtagtgttgataagtcggtaagaagcgatacgggtggtagggatagtcttggtcgaacggagtgctgtcctgatgaacatcgattgtttaagttatggttaaaggtatcaaaggggtccgattcgacgaggaattcgattgcatcgacaagggaggaatgtttgattatatccgaagagcttggaccgatccgctgctcgctggcgacacgactcgaagcgactttgcttttcgatgacgaaagcgaatttgcgatgacgtcaggctcgaaaacagggcgaagcgctgttgtttccaccaggaacactcgatacgcgcgctgggtggaaataagtccgtcatcaagttggaccctgtccggataatctcggttaaatcggctacaacaataatatcattactactacagacgatgtgcatgaagctgaacgttttgaacggcgtctccctcccaacccttccgaccctgtagtcgaacggtcctcgtcgtcaaccccatccgcttccagaacaacatgctgctctcgtccttgtcccccgtacctctcgaacgtctgatgatgccttctgctttgagcgcgatcgtgatgccgaccgtctcgtgtgatgtgtatgatggtgatgattgtttgtcgtgatgaccaacgtgaagttggtagatgtcgtcaaaatagcccgtaggcgaatgtgatgattgtgctgtgaacgaagatgctgtcgatgctgttgtcggtgatgatgacgatgatgatgatgatgatgatgatattgtggttgatgctgctgctgatgctgattctgatgagttgggcgacgaacccatgcttgacgtcgaccttgccgaatcggacgctaaagtccatcccgccttgaccgccccgacttcgcccgcctttctcgtagccatcccgacgagcgtctcggccactcctagtctcctatactctgggtcgaccgcgagcgccataaagtgcaagacgaccttggttctcccacctggctgcttgtcgtgttcgccggtacgcggatgcatagtccggacgatcaggcaaccgaggatgggtaaccggtggtccagcggttcgtccgaccgggtgatccctgatgctctgaattggctaccgagcggtccttcttcatgaggaggtgtcgaaggtggggtattgttccagaggtgatccatgatcgactttgacaccggatcagggccccatcctgaccgagtatggataggctggacgacccatgcgtggcagtcggccgagttgaggaggacggggaacgatactccagggtcaaactctgggaggtgtcggtcctacgaacccaaacatggtcatcgtcagatcgcaagagggaactcgatgagacgagacgggacttaccaggaattgacccaccaccctgaaatcccgcgctcggacccgaaaaacgcccagaggttcgccatgcttgcctaccagaccgcccttggggatcttgcgagtcgccgagacttttcggtaggcatcgtcatctcgaggctcttgcgggaggggtaacaatggcagccaagcgttctgtcggggaacctctcgcctgccataagtcgaatccgctcgatcgcttagccggggtcggaagcgcaacccagagccgggtgggatgggacgagaggagatgttccaccgagcggcgtagctgtatcggatgtcgtcttggtggtcatcgtcaaagtccaagtcgaagacggaaaggtgaccgggctcgtcctcttcggcggatgaagcgctgcacggatgtgaaggagcgccgtgggcaaagatgtcaccagggatgtcggacgacatggtgtataatatcgcaaggaacgggcagctcgaaagatgatctaggtctcacacgatagtatgacgttgaaagggtcccttgcttctcgacaaagatcctcggtcagatgacgggttccatcgtatgaaagttggcagcaagtcgtgtgacctgacgcccgcaaagagatgatttcgggccgctcctttgaacctgatctttggtttcggaacggagaactcgggagagctcctcaatctttttctggatgaagcggtgatcagctcattcggggactacgcctttctttcaagttgctcaggctcgcagccgccctctcatgattgcgtgcgtgcggatagggttgttttgggcagacgacccgtcgagcaagtcgcttgcggcccgacgcggatatcacgacattcaacgggactagcgcgccccgcatcactcggtctaatggttatcgcgactgttccggaagagaaaatgagcagccccaccccggaaggatcctgcgatgcgattctgcccgagagtgagtccgctcaggaagcggggtcccgctgaaatcgtcttccagctcaaggaatctcggcctgcagcgtcgcggctatcattcccaacttcaggcgatagcgccactcggtcgcggagatcttgtctaatctcagttcggtcgaacagttgacccatcgcccgggagcgagcggaacgatcagaagcacaggcctcacccagcgcctctgaaacaaaagaaggacgagatgatgcataatgacgagctcaacagacatgaaacccaacaacgagaatgactgggagaatttaccggcagcgcttctcaaacatagggcggacaacgaaatgctgctgtgaccacgacgcgccaagcctgtccagccgcgacctgtcttttggtttctggatcaggctcccccctcctgtctctcagcggcgatcgtcttctcacgtctattacgaagcgcagctcacttattcaaccggttccccgaaacgaacttggttggcaaccgtgccttcgaggggaggtctccctttcgttcgaggcggcaaagcggcagcctgttgtaaccttcgatgatgactcttggcgatcatctcctcgcgtcgtcgagcatgcgatgtcatgtatgtaaacacgctcgagctgaatacgtgtcgaacccattgttggagacggatataggcctgaccgcctttgagtggatccctcatggcttcctgagcctcacggtagagagctccgacgtgagcttcaaacgcgtcggccatgaccatctgtgcgaggtgcatgttcctgtctctgagacttttggccatcactagatcgtgcgtgatcccataatgacggcagatgtaggcgtatgtcacattcgaggtcaggacgcttcggatttcctgcaaaaccaaagtcgatcgatatcatgagccaagccggctccaagtataccccgcccaggtagacgagactcacctcctttccccccgtattcatatcgggatacagatcatccagcatgaccgccatttcggaagagagcaacgtatccccgatgaattcagtttttgaaatattctctttcccaccggataggatcacggtaccccttcggttcgtcttcttcataccacgatcggtgcattttggcctgttgggcgagatcctcgttcgagataggcatgaggggtggcaaggcgttcaagttcatctcgcaaagaggtgcgaaccacgagccggcacacggtttctagctcgtatcggggtggtcttgacgtatgttgtcaccgaggcggatacgtttactcggtccttcatcagttcgccggtctggtcgtcggggcaggtcgggacgtggttgtcgatagggctcgggttcaggtcgtctattcatgtcgggacgtcgagaatgatagctgctactgtatgtgaatgatcatggaaaaaaggcaacgtcgatcaacatacgacaacaagcaacaggccaacaggcaaccaagtccttttggtggcctcgtcgcaacgtgatgtgagcagctgagcagagttttgatcacgatcgccgaagcaaagcaccgttcttcctgagcgggggggagggcgtctcgcgttccggtatgctccgatattcgaaatgagcttacggcattattttggatctccaaacagaagccgcgaagatactcgctcgcgcttgtggggtcccgaacttgaattcctgagatgtatcaaccgaatggttgtttggtgtcttgacgtacgaccgtcgtcgttttgagatgatctcgaccgattgaacagacgtccgagtcgcgagcgtccgctctgcagtggatccagcgaaattacgaaatctgcaccgtcgtggatggtctgattgcgcagctcctcggtcaacggaaatactcggtcggcgatcatgtggcctaatgcatcggacttcatcggatcccgccgagttgggctcatttcgaatcgaggaaccaccagccgcccacaactgaagttccgtcagctggacatcaagagggaacgactatataacctgcaatcctgtgtcacgagattgtcaggttggagtcagctacatccttgttcatctccattcacgaacaatccccctctcgctacagccccagcgttcatacatctcctcttcatagccggtctcatccagcctcattcacgccaactcgctacaccagcccctagccacattccatcatcatgttcaacaagcaacacggccaccacggtgtcgagggcaatgactgtgagtttagctgtcggatcccggagctcccaacatccgataactgacctcgtttgttccgaccgcccgcctttcgtagtcctcggtaaggacatccagtacttttcgcaagccggtttcgacatggacaagatccacatcaagcgcaacgctcccgtcgccgccttgtacgaggacgccattatgaacgaaggtgccgtcttgtcgtcgaccggtgcgctcatcaacttttccggcaagaagaccggaaggagtcccaaggacaagcgtatcgtctacgaagacggtagcaaggacaatgtctggtggggcagcgtcaacattcctatcgagtgagtgcaattttccacaagcaagatgacctcggaatcccacgactgacagcttctctcatttgtcggcgttctcagcgagcacactttcgagatcaaccgtgaacgagccatcgactacttgaacacccgagagaacgtctacgtctttgacggattcgccggatgggaccccaagtacaggatcaaggtccgagtcatcgcctcgcgagcctaccacgccttgttcatggtgagtccagcgcgcaccacctcgaccgattcctcctgacatcgtactgatccctgcgtcgtcttgcagcacaacatgttgatccgacccagccccgaggagctcgagaactttggcgagcccgactttatcatctacaacgctggtcaattccccgccaaccgattcaccaccggtatgagctcgaccacctcggtctcgatcaactttaagcgaaacgagatggtcatcctcggttctggtgagtcccggcgatagctaccgtaccgcaagacgttccgtcgactaaccactgcgcgcctcccccctctcttcagagtacgccggagagatgaagaagggtatcttctcggtcatgcactacctccagcccgtcaagttcggacagctctctttgcactcgagtgccaaccaggctcgtcccggtcccgacggacaagagggcgaggtctcgttgttcttcggtctctcgggaaccggaaagaccaccttgtccgccgaccccaaccgtctcttgatcggtgacgacgagcacgtctggtccgacactggtgtcttcaacatcgagggaggatgttacgccaagacgatcaacctctctgccgagagggagcccgagatccacggtgccatcaagtacggtgccatcctcgaaaacgtcgtctacaacccggccgaccgagttcccgactacgacgacgtctcgatcaccgagaacacccgatgcgcctaccccatcgagtacatccctaacgccaagatcccctgcatcgccaacaggcagcccaacaacatcatcatgctctgttgtgacgctttcggagtcttgccccccgtctccaagctcacccccgcccaggccaactaccactttatcgccggttacacctccaagacccccggtaccgaggacggtgtcaccgagccctcgcccgttttctcgacctgttacggtgctcccttcttggtcctcgaccctactcggtacgcttcgatgctcgaggagaagatgacccagaccggcgccgactgctacctcatcaacactggttgggtcaagggaggcttctcttccggcggaggacgatgccccttgaagtacacccgagccatcatcgactcgatccacagcggtgcgctcaagaaggccgagtaccagacccaccctgtcttcaacctcgccatccccaagaaggtcgagggcgtccccgacgagctcctcaaccccgtctggaccgacgccgatgcttacaacgaagctcagaccaagttggccggcatgttccagaccgccctgaaaaagtacgaggccaccatgtccgacgccgtcaagcaggccggtcctcaggtcgcctgagcgggactcaatggactctctttttccatcactcgccgagtgtatttctagccagtcaattatacctcgtctttcccattctcctggagagtctcttagattcccacgtttctacatcattggttgtaacgataatagcagattcccttagcatgactcgataaattatgatcgataagactcatcttgcctcgaaacgctcgggccgttcatcgttcatcgttcattttgcttccgcgtcgatctcggctctcgtccgggcgagcaaccaggagcgccctccctttcatcgaccaaagctaagtcacaatagggaacgcttcgcctcatgtcttcagctgagaagacactttgtctcgacacacctttacagttccccaggccaagacgagcgtctgtatcttatctcagcttcaacacaaggaaaggatcgatcgtcatggccaaagtccagaaggaagtggatatcgagaggctcatcgctcaggaggcgagcgatttcatcaaggagctcgaggtaagtactgtggttgtcagcgacatcaatcatcatctcattgctgcccgaatccgtatccaggtggaacgagtactcaaatcgttcaagttgaagtgagaacgcgatgcaacgagccaattcggcacttaggctgatgtgaaccctctctctgcatcatctagcccgtacgacattctcgatctgggcatcaatgcgaccgagaatgagatcaagaagcagtacaggaaaaagtccttgctgattcatccggacaagttcaaacatcctcgcggtatagaagtacgtatcaccgctcagacaggcccgtgtgaggggcgtctggctgatttgctccgggtgttctctcgacaggcattcgatcagctgaaaaaggtaagtcgacaagatctcgatgtggtctcccttttctgaccctgctctacggctggtccggaccatggcatccccagtgatggcggtacatgcagcagggccgaacttgtccgagcctttcctcttggcaactacgctgcatctcgacgctaactttacttcactcgatatttgtcaggcagaagcggtgcttggagataaagacaagagggacgaggtggatgccgtcatgagacatgccagagtgcaagtcctgaagccgtaagtcctgtatgtctttccgaaagttgccggaatggctcgttaatgctctcgttacaggatgtttccgccaggaacgaatacgtcggaaatcccagatgacgacccccagttgacgaatttagatcctcctctcgacatgcaggtcaagaagaaggctcgagaagtctttgtagaggaggaacttgccaagcgacggtgagcatgggttggatctcctctcctctcgctttagatcaaacttctcactccctctgcttgttgtcgcagcgcgcaaaagatcgcatacgccaacgaaggtgctgaagccgccaagaaagaagccgaggtcactcagaggaaacgaaaacaggaagacgaggctacttgggaatcacgacgggatgaacgtgtcagcacatggcgagaatttgcgggcaccagctcatcctcggcgccgcccaagaagatcaagaagaagaagctgaatgttttgggctgatggacgatttttgacggggaaatggcgggtatggcgcggacaagttgtatgtattcagtggatcaatggatcgaaataagagttgtgcatcgcagaatcatacaaagggtgaacaaggataagatgttcggtcggacaggcggactacgagatcctacaaacgcgcaccaggtgcgggggaaaagcaagcgaacgttcgaccctggctagacaatcctcggtgtactgtgcatcaagacttttgcgccttgcgttgggctgggtggggggagggagcgttgtgagaaagcgtacccgaggcggacgcaattcggccatctactcactaggattttcggtgtgcaagtacaaacaccattcgttgtggcatctcttgccgctcttgcagggctgactagcgatgtagtccctgtatcgcaagaggaaatccggtcccatggccacctctccgtgaagatagcgacagtttccttggcttcgacgggtgcatcgaccgcgcagatagaagctggtgcacggggtcgccttgaagtgtcgcaatagcgagagatcatgccagttgtggatcactgcgaggcaaatgggtaagctccgagccgactgtatgagcaaatggatcgctgggactcgcctgagatgggcaggaccatttgaactggtgcaggtggaagtggtggaagagaggtgaaagcagaacacctcgggtcgagcgatgacatccacctctcgacgctcatgacggcgagtccatgattggtgatcggatcagcatcatagtagcactcgtccatcaaggttgccagtaggacggtgggaatatgatgagcgaaccacggaagcgggacgatagccgacttggcgagatagacccgatcgacgggacgaacgcgtccgatcaagctgcgactgatgtctgagaaaggtcgaattcatcgtcagtgatctgatccatcactaccagagaaattcggacgaactctcgattgtaggaagtacgagactttccccctcatctagactagcagccactttgagtccccgtaaaaactcgttaacgagcccgaacctgaaatcgtaattgtcgtaaaacttgtaatccttcttgctgcagagtctcaagtgaaacttggtcggaacactcagatgtccctgataggcgtgttcgatctcggcgatatattggaagagcgtgttccagaaccggtgtccgccttgatagccccatccgatgagttcgtccgtcatctattggaatcgagtttcggttggtaaaggatctaagggcatcgtgtctaggcgggactgactttgacagagtcgagatcgatgacgatcatagcttccagagccgatctggggcgacgggtgaccaggctgcgcgaagctgtcatgggcaaaggtagcggatggaacggcaccgacatggggatcatatcgccgcaaggtttgtatggggcaacgctggccgggagaatgggaggggtgtcttgcggagtgatgggtccacagatcgtctctggggaagacgagtaccgggtcgggacgaggtcaggccaccattccacccctggctggaaggcaacgatggcgtgggccgaggggagtggctgaggttgaggcgcttccatcttaggaacgcgagcaaagactggttcaggtgtgacctatcgaagacgaggtcggccattcgtcagtatcatgggttaggagaacttgccaaaaatacttgcgtcttgtgtcttttcgacggtaaagtgctcttccttgcggacaaaacgttcgagattgtgagggtgagtcggttcgtgcatggtgatcggaattttttccgttttttgttgatcctctttatactagcgacaatcaagaagcttcagatactccttgattttagtgcttcttgttcgccagtccttctgcgttcgtatatcctgttgaaaagggtcagacgaattgtgtttcgacattcaggccatatttatacacgaacctcctgcagcacctcaccacgcaggcaggctgacagtcaggcagctgcacaaagtggatcatcctccatcaacaacgtatctcaaaagtacttgcagagtgcagggagagggcaaggacgtgaccattggggagcatgcacagcgatcacgaacacctctttgtttcctgcccgtatgcactaccaatccaggtttcagactgtgcccatcggcacaccatcatcagctaatcgaagaactgatcagcacagcattctcatggaagcgagtctgtccagatcggaggatgcgatccggtataagggaaatatggccgaaaaaggcgggatatgagggcaggatgccatggtctcgggacgatgaccccatcacgacgctacgggatccccagggcctaagtggatcgctcatttaacaagcgccgccttccaaacagaagaattgtcgagactcgacgaccgtctgtctcactcggttccgtcaaaggtaggaaaggttaaaggcctacacgacgacggcgcttgccagaacattgtcaaaacgtttcaaaccggtcggagcggggatcaggaagcgattgtccgggaaatcacacgcccgtcaaagggggttcagatgcaagcgagatgctgtgcatcgaaaataaacaccccgaggttgtggatctcgacgacaatcgacaaacaggccacagtcaaggtttggatcggtcgtcgtcaaccaaacttggacaaatctcgatcttcatgacgcctaggatggacgacgccaagactgggtgaaacgagggggtttgtttgtccttagcgcaagaagctgcgtccctcttttttcggagccttttcccatggccggttcgggtcgaaggttcgggatcaatcacgatccagcatcttacgcgtggtggccgagatcccgggagattagcgtgatttatcgagagagcgcaataaccgggttcagcgagattggacaggccagtgaggaatgcaacgtttgaacgaggagacgaccggcaactgtcgattcactctctactcccagctcgatgctttatataccagactacatctaagagctctttcgttcgcatcgctttgacaaagcatagagatacagatacatcgagctgtcatcacatatcccttccgtttacacccgataaaccactttgcagaccagacatcgacatcctgcattatgcccgccgatattctcgttcatcacctcgtcaaatccaggtccgagcgtttgtgtgagtctcaattacgatccactgcgggatcctggttcggactggacgatgatggctgactgatgcttttcgtctgttctcacagtctgggctcttgaagcgagtcctctgcatatatcaatccaatgcttagcatctgaactgatcgaccccctcacccccttgtctggaaatttaggagctcggcctcgactacaaggtcaaggtctggcagcgtacttcggaccagaaggctcctcccgatctcaagcaggtccacccgctcggaaaggtgggtccggatttcgatctcgatttaaacccgacgtcagacccgctgaagatgagcgccaacatacgctttcttaccgtaacataggctcccattgtcattcttgacggcaagaccttggtgtgagccccaatcactagaaagatttgagctgaagcacagcacactgatcgattggtgtttcgtctgggcttcttagagagagtgcctacatccttagtgagtcggtggtgtaccgagccataaagtttgcacgcaaaactcgtactgatcgggcgaacgacgctatcctcacctcgtggcatcacagccaagatcgctcaattgcaagagggcttctctccttctgacgaggatactttctgggctgccttttccgagggctcgttgatgctcatgctccaaggctctcgggtcctcaagcaagccgctacccaagcgccattcttggcgaggtcggtgatcaacgggttttccggggcgatccacgtgagttcaagcgggatgcgggtatcccgcagcaggagagagggctgaactcgatgaccctgtgttgcaggaaaaatactatgacatcgctatccaatccaactttgacgtggtcagtcctgtcgagatcgcgtcgtctcctcttgcccccccccctttccatgccctttgccccgctcgcggctattcccccctcgatgctcgttgccctcgattatccttggccagccgcctcgagaggtagaggagagaatatacattcaatacacctcctactctttttcctgtgaggtcgaaatccgctcgtagtccaaccttctgctcaaaacaataaactagaagcaaagatgtctatgcgctctgctttcactcctgcccttcgagcttcccgctcggccgtccgacctgccctcaggtcgaggatcgccgtccgaggatacgctaccgaggtgagtagtgcgataagcatctgcatcgaagaagccataacccgcaacagtgcattcgattgacttgatgtcaaactccttctttaccgattgccaccagcccgccaagtcgaacaacactctcatctatgccgccctcgctgccggtgtcgccggtgccggtggatactacttctacggaacctctgccacccccgccgagagggttgaagagctcaagaccgccggacgagaggccgagcaggtcgccgaggccaagactgggctcggtttgaagaagaaggaggattaccagaaggtttacaacaggatcgccgagatgttggaggtcgatgactacgatagtgagcgatggaattcgatcttgttgtctccttctccggcgttaccgacactcacttgtcccgactgatcatcatagatggctcgcttgctcccgtgctcattcgtctcgcttggcacgcatcgggtacctacaacaaggccgacaacaccggtggttccaactacgctaccatgaggttcaagcccgagtcggctcacggtgccaacaacggtctcgtatgtacctctggccgtctgcacctgacgtggaagttattgaccgtgtcgcctgccttgctgcctcctttgtcgtcctgacttgaatcccgcagggaatcgcccgagaccacatggagaagatcaagaaggagttcccctggatctcttacggtgacttgtggaccctcggtggtgtctgtgccgtccaggagtctgccggccctgtcgtcccctggaggcccggtaggatcgacggatacgaccaccattgtaccccggatggcagattgcccgacggttccaaggctcaggaccacttgagggacatcttctacaggatggggtgagccaaagggtgctcgctcatatcaccacgaagcgggcaaagatgctgaattcttgggtcttttcgatgactagcttcaatgaccaggagattgttgccttgtccggcgcccacgctatgggacgatgccacaccggttagtatcgggtcgcttgcatcatggttatatggactttccactgagactctcgactcgaccttggcgctttcagatcgatctggtttcgacggcccctggaccttctcccctaccaccttcaccaacgactacttcaagttgctctttgacgagaagtggtcctggaggaagtggtccggacccgcccagttcaccgacagccagaccaagaccctcatgatgctgccctctgacatgtctttgaccaaggacaaggagttcaagaagcacgccaaggcttacgcccaggaccaggacttgttcttcaaggagtgagttaacgacgagcggtttaacaattcgaggatttgactgacgagccgtattgatgtctcctacagcttcgccaaggtgttcaacaagctcatcgaattgggtgttcctaccgctcaatttgccggcgagccttaccaccttaagaccatggacgagcaggacgtctcccgataaaccaacaccgaacggttcgtagggcaaacgagcatgaccgtgcagggaaaccctccgtcagcgaaggctgttgaatcagaaggaaacgcccaaagtgcgagagtcgtggatcggaacgcaaaatgtcttgtagatgtcaatacctgtttccaacctatcctagttaaaattacttgatcacgccgcagctcggctttctgagccgttgaaacttaggtggattatcagaacgactcgctcactttcaggtctgggcattttcttggccttgagggccttgaggcatcatcagctcgaaggagatctctgccatctccaattgcaatgctcgcaaatcaaggttgtcattgcacatgacaggagtctggtcaagtccagattcataccggatcgtcacctttgaagcgaatcgatttgagttcggtggttagggtacctacaaaggcgagccggttgggaaaccccacaagctcgggcatgactccctagatcagcgattgagcccgggtcgatcttgatcgtgacagacttaaggcagggccgttcgcgatctcggatggtattcgagttccgctcaagccaaaggagggtgtgcgatcgaagatctggcagggatgatttaggcaagatcgtggagatatcgccctgtcgatgcggaaattgcccctgctttggacccaaacacgtcaggacacggactcttcgttcaatttcccccttcgatccctaggtttgccttttagaaaatcgattcaggtcgctacagatctgtcgctcgggcagatacgaaggcccgagcgagatgccgagacttattcctgtacgcgcgtttcatctttaccccgtgatcgcgcgagacaatgggcgaagggcgaaaggggaagcatacgggcaaaagagggaggaacaccgtctgatgagcttcgatcaaggtttgtcccgtctaaaggagggtgctcgaagcacagaagtgaacagccgaaccgagcaccgaggctgcgtaaagaccctcctttcgctcagatccaggagttgaaacctttttctcatcagcgaaactgcggaatgatcaaggcgacgacgctcggtcggtcggtcgtccaccagctccagtgagccagtgtgatcgactttagatgtttcgtgatgaggtaaacaaacaaatgacgaaagtaaacaaaagcagaaccttggcacttggtctgagcgtgatccggtggcgtcaataaaggtagaaaagatcatataacagcggcagtcacaacggtccccatcaacgcgacgtcaaatcgaattccctctctttcatcatcacttcgacaatttcaacacgacacaatatcgaactcgacttttctttcgacctttcgaagcacgctcgccaaggcgaacaagaccggttgatccagtctcagcatcgcctcagctcgccactgtttctttacatatagccattcactcttccggtattgacttttgcacaaagggacccttcgtccgcttcgcacgtacaccgaatctatctcttcctctcgactacatggcatactgactatctgctcttccactctcgtacatagaccactacattcgttacagttagcatacttcttacgacctttccccggaccacctaaggatcaccttcggacccggcacgacccaattcctactttcctttacgatcacacacatcaattttagaccttgtaccgtcaatcatggtcagctctacgattttccgcaccgcgctcggtgccgccttggccgcttcctcggtcgtcgcccagtcagatgcttggcattttgacatcgtcaaaacgctaatggtcgcccgtatggagtacgttcccgccgcgtccttcatcccgtgacaagcggatatagacgttgaaactgacccgtctagtacttgtccatcatcgcagtccgatcgtcgacccgggtcgactctccaagcatatgcacaggattatgggagggtccaacttcgccgcaggttactcgtacgagaacaaccgggcttcggattgcagtaccgtctacactccctttgacatgtccaactactggcgagtcgtctcttcactcccgaccccaatcatactagattctgatcttattctgcctgatgataggactgctcagatgtattgggccagcaacgatgccaacgaggtcaatgctgatactacctacacttctgttcctgccggacaccgagtgagtctacaccgctcaccatctctgttactatgggcatcgaattctcacaacacttgccgcatgtccacagttctactacttcttgacccgaaacgctccagatgtccccgtcagtcctttccctgaaggactcaggatcctcgccgggaacaaggatgcgaaggactggggcgagacaggcttacccgagcaggcttggtcgtagtgagtctcccagttttcgacggaaatggtttgaagactaatcaagactcgacctgaaactttctagcacttgtcagaagagcaggactgatatgagccagaacattgcggttactacttggaacgaactggacacgtactgcccggaactcaagctcgaactaaagttcccttcttggtaagtggttcatcttgagctttaccttgcatgctcgcgcattaatggtcaccctctgactagttgggacggaaagaacctctatgcggaggacggctcccatatgaccgtgagcatttgtaacccgatgcagtcggtatttgggatactgatcatcatttttcggatatgatagtacccgagtaagatgttgtacggagtttgccctctttctcaccccgtcaggattcctgccatcatgttcgaggtaagcatcgagagattttccatgtcggaaacccgatagctcacgactctcgcttcgcagaccacttggaacctgcacatggttattgaggatacggacacgcccaagaaccgaatcatcctctcgaacggtgacacgacgtgagtgcaagagtcctaccatctcggcaaggtttgcctgttgacatgctccggttgcatagcggattcggcacccacgtcgatttcgccaacgtgggttcccgtaccagcgcctgagaggtgacagagccgctaatattacatgccacgtcagggttggaacacttctatcttgtaccaggctctgaacgatcctcgttgcgtgaatgtcggtcactctatgtcagtgtcacttcgccgcttctctggtagaaatcggaccaagctgaacaatgggtcttgattgctaggcccgctaccgactgtcccgtcttgaacatcaattacgaaagtggacgagatgcagccgaggcgtgcaagcccatgcgaggtcgacttgacgaggatggtactgaagatggcgtcgctatcaagaagcttcccggatgcaatctgccctgtgagtttcggcgattccgcgtatcacccatgaaactgattgcgtgaaaaatgacatgctcaggggcttccggacctaagcctacctgcgatggcgaaccttccaaggaccccgatctcaccccgttcttgggggtcgagactcagggctatgctgcgaccgccgccgatacccttaaggtttacaaggcgaacatcctgtcgcaaaccgctgacgaatggcaaaaggtcgggtgtctcggtgacagcgctttcgcggaccccactatgtggcacagctggaacaaaatgaagatcgactcgtgagttgttgttcggtccaggtgagatcgctctcaatgctaactccattcgtgtaactgcataggtgccaagacttctgcggcgagctcggaatgccctactccggtctggtaagtcaaaccgcatgtgtcctccttgagcttgggctgacagcacacaatctgcctttacagcgccttggctaccagtgcatgtgttcctccacactcaacaacaatgcgtctctcgtgcccgactcgaagtgcgacaaaccttgtactggtacgccacaccttcttcagatgcttctcctcctactgctgcagacgactgatcagcataatgtttccaggggattccaaggttgactgcggaggtgaaggtctgcttcaagctttctataagccgaccgtaaaagcacaagctccctcttcgaccgacaagtcgtacgttggctgtcatgttgacggcactgtaaccgggacccgcaaccctgattggacggacattgacggttgccgaacctactgcggcgacaacaagaagaagtacttcggtgtctccaactcaagatactgtttctgcagtgacgagctcaagcaggactcttgggagagtcgagttcccgaagccgaatgtaagcgcggcgaacgatggatttctcacctcttgacctgctctgatacgatttcgttattcaggcactgccaagtgtcaactgaacgaagcgcaagtgtgcggtgggaatcaagacggctacatcttccagagtgtattcttggtgtaagtgcttgtggtatgtcctaccagaacattcgatccaatactgacactcgactgatacggtccgcagtgacggggaagtcgaggttccagtttcagaaacaactgcgccggttccagaggtttcgtcctcggctgctgtttcggctagcacctcgttcgccgctcctacgccagtcggggcagccaagtccggagccgccagcattgtcgcctcccccaatgcgtcaactgcctcttcaaagatcactgggggcgtcatggatggagggaatgccgatgcattcaccccaaccaaagcagtgatcgggaacatcgctctcgctcagcctgtcgcgacaaagacttgcaagcgcactcgcaagagatctcagcgaatccggaagaagcgtcagatgcttcgccacgcccagtccatcgtgatgtaagccacggacgcagtcgatacaaactggaggtgcttgaagcaatattcggtctacttgtcggtgactttgtctagttgaggagaaagtgatgatctgtaatcccggtgatgcagatgagatagcttatatgaacaaatgctggctcagccacttgattccggaccaatcagagaaatcattaacgcatggtcatgagactgagctatgaagttcacgaccgaagtcgtctatactctcaccaaatacaacgtagagcacgaacgatctagaaaagtccaaggaggtcatcgttttgtgaagagttcgccgtcttcgttacaggcttgtttggtcccgatccgaacccaaagtcgtcgagtccgctgaacgcgtctgctttcgaaacctgagccaccggcgctacagaaggagcacttgccggcgaggaaagaataccgaacggcgaggagttcgactgcgtaggagctgtagaaggagctgacattgtattggatgcgaacagatccataagctcgtccagggggttcttggccagcgcttgctgcaccgatgtcgactgcgagccgcttgatacattggcgaatgctgaagccgaaatggaagtatctgccattgctgtgggttcatccatgtcgaagtccaagaggttttcagccttttgtccctgggcgacggtctgcaatgccttctcctggatgttgtcctccaagctacacgaatatcacacgtcaccatctcggcattgtgtgcgagcgcaaactacggtactcactcttcttgtcttcgcttagccatgtcttcagcgccatatcgcccacgtccaataaaagtggcagccggtttatgatacacgctagcaagcgaagagatctctccgagcagctcatccagtaccgctgctgataccgtagtctgtggtagcgatataggcggcttcacagaaagcacgacagcctgaacattgtcaagaaatgggtttcagcgcagtcgtgattgatagacagacctgtgcaacagaggctcaccttggcagctgccgggtccgtcgacaataatcgccagtagacatacgccttgtctcggacatcgggattatcacagtcttttgtagccgcctgcaataccctctggacaatcgcttgcgcgccatctggcttcttgaggaacagcttgacgatcgcggtgactgtttgcagttgcacctgaacgatcggaacaacgtcagtggaaaggccaaaatccttcgaaaaggccaacatacagcgtacggttcctccttgaagctttccaagaagattccgagcagttcgtctgcattctcaatcttctcggcgtattctccgataatccaaatcaacgaagctttggcctcaggttcatccaggtcgtccaagttggcacaaaggacaggaataataccttcatagctgtgagggtactttcggaagatgtcctatcgacgaagcgtttgttcagtcgcaacatcttgactttccccgatagagtagcaaaccttgatgacgacgactccttcctgtaccacgtaggcgacccttgtttggatcagatcgagaagcaattgcacacatcgtcccgctgcggattcgatcttgattgcagtctggccaattgccttgaccgctttcctcacgaaatcaacgtcgacttccgatgcgtatctatgcgggcgagggcgtgattagcaattgcaggatgatccaggcgtaacactggtcgcccaaacttactcgcgcaattcacccaacaaggtatccacattcctttcgtcagccaggcggaccatgatatcgagcttctctactttgacgtatggagggtcgttatatttgcagaagaacaccctcatctcattggcgagaatgtccggccgcttttgtagcaagagattgatgttcctcagtgcaacccactggacctcgggagctgaggataccaaggtgactagagagagggcaggggtcagtcaagccgatcctcgcttgcgatcatttgctctgaagaacttaccaagaggaggggccatcttgcggataagttgtgttacgagttctggccgactgacattcttgatgtgaatcatgatgacctgtggacagcacgtgtcagctaatcgggctcttaacgggtgtcagcggcgagcctaccttgacggcaccgagaactactgcagcgttcgcatgctggaattgaggcattaccctctcgcaaatgtgctcgctttccttgtcgtcttgagccttgtatcgagcgagagcatttaggagtgcaattcttccccattctgagcattcgttcagagccaaaagaagctttgagagcgtaggaggatcgatgacaaacaaggttggggctggcctggtagcagaaggaggagggctatcgccgtcggcgtcgggagagcctgatcgagatggcggcatgctctgagcagcttcatggatatccataagagcagtcacagcgttggcgacaacctgtaagaatggctcagtcaacgcttctccagaagatacacggattccttcaactaccctagacctaccatcgggtttccatctccaaccagatctcgcaatatctcaataaagccccactcaacgcacagctccggttttagctcgaatgccttggcgacacagagcgcggcggtctttctgacgtatgggttgtcgtcgcggagacatcgattgagaggttctcctaggtacgtcaagatcttctccgcctttagagttgacatggttcgaatggcaagagctcgaacgagggggttgaaatcggcggtgtcctgcggcgatccaacgttcagctgcctgatccgcttgtcactcgcaagcttctcaccttgacaaatgtgttgacggcaaggatgacaagttctggttgggtcttggcgtaattcatcagatacaggtagacgagctgaattgcagtacgatgatcgatcagtatcaaggcttgtctgaacaaagcacatgtccgcaccttcttctgctctagatcgtcggtttgctatagcaattgcatgggtctttagctgagttgtctttgctggatttattgtccagtggagctgaccatgttcttcagcacatccggaaaaagaccggaaacatccttcccgacggtcatattcgcaatgacacgcttgatcgcatcggcacgacgatcccggtattccgagttgagctctgctcggagctcaaagttctcgcctataatgaaaccatcgttagagctcggagccgatatcgactctcaccgggctagaaagggcatcaggtcaaacgctagaacttacccttcctcggaggagctcgactcattttggtgattgtctagaggtccttttgttgtgttttgtcggtcctcagaagatcggtcaaaggggactttcggatgagcagtaaagttcggtgcttgctgatagcgagatcactgcagaactgtatatatgctcaatgtcgagctgccacatcaaagaacgttgcccaattgcccaacgaactcccaggacatgctacacaagcttggacgctccgatatgacaacaccgagaagcggtttccatggagtctcagctcaatcgtaacctaaacagaccgctcaacacacttgggctgcgatcgtaacaaggcaaacagctagtgataggccggattgattctgtcaagctacactactgatggatggaaacaaggtagaaatttccgtgattctgtgcggagctgatgccgggttcgagtcgcgatctgtcacgaaaaatacactcgtcggacggcagatactgttcagtatggatagatacgttgtgcaggtgggagcaaggtaatcgaaagcccgagaatatgttgagaacgaattatgccatcgttgtagccctcagcaagcctaaaccgctatacaagagaaacgtcgacaagccctaacgccgtcccgtgtcgaccagaggtcacctgacatcatccgtaacgaattaacgatgaatgaagctagtttactcctcgtcggcctcctcgtcctggtcgaccttgaagtacttcaaggagtaggtgtccttgtcggtggcgacgactcggaggaagttctgtgacggtcaccgagatttgggtcagaaatgctgaaaggccaataagagggagatggcgactaacctccaactggttcttcttcaagaacttcttggtcaagtacttgaggtacctcttggagaagtgggtctgagcggaaaggacgagcttggctcctaaaaaacgcaatgtcccaggacatggtgtcagactcgtgcaacaagggtagaagaagacgacgctcgactaaccgtccctcttcaactggatgttgtcacccaattgaccggtctttccctcgaccttgatacggtcgttcaagaacttctcgtaaccagcggcatcgaagacctggtcaccagcggggacggagtagtccacgacgaacttgtgggcgggcttggaagaggcggaggtagctttaggctattgagtagaggaaggatggatagcgagagggaacattagggatgttccataaggtgggtcgaattccatgtcatcacacgatatcgtggcatagcagcgaaaaaaggtaataaaagggtagagtgagaaagcgtcctggacgaagaagcagcaactgctgaggagacgcaacgtaccatatctacagtttgattatcaaaagatatcggtctgcaaaatgatggctttttgggttggaggagaagatagacctgggggtcgatgtgatctcaaaagggaagagaagaggtcagttttcagtatcgaaagcgagagggatggagggcggacaggcaggaagcaaattttgatgggaaggataggaaggctagaagcgcgagttgcggacgcgcttcccgattgcgatcgacaggacggtcctgcgtagtccaaatctaacaaatacattaatttaaactagcttcgactgtcaacaatggcgcagtgcccgagcggtctaaggggagtgattagaattgattcttattatcacttatgctttgcatgcattggttcaaatccagtctgcgtcgaaatatctttttgccgcttttttacacccctgcgttccgctctttcgtggccatctgcctaaatgggcggtcgaagagacgcccagagatctgatggcccgcaacaatcagtctggtagatctgctatgcttctggtatggcatattctccgccgtcgcgtgcctggataggtgcgctaccccactttctccggcgatcggtatctgcttgaacttcgaccgctgagtcaaaaagggcgaagccgggccgggttgtgaacaaacgggttggaagagaatctagcgaccgtcagagactgtgacaataaatcgaccatattcacaatccccctcgattacatcacgagcgcatcgacctgatatccatacgcgaggctacagagagacgtgaaggaggtgcggcgtgatgtcgtcaacgtaatcagagtcggcgctttgataatgacgatcttgagcaggaacggcaaggtctgagtccaaacgggtggtcgatttactgaaggcgcactgcgatgtattgcacctacgagcctcccagagatctcctgctcgggaaacggcaagtagaagtgcgcggtcgaagctgtagatctgatcgcgcaaagtacagtcagcgagtcgactgcttgaacgaggtcttatgggtacacaaaattcaggctgtaggtgcccggtgtttcgtacaaggtgactgtattatagcgagtcaagcgagtagggtgtatagcgtgtgtaacacgatgatcgttgtgttcgcaattagcgcggagtctcactcatcattggtaaatccggaagcagatattccataattccagcagctgcatgcgcacccaggcagtcatatgtcagaggcgggttcgttggcaatcaactcttggcgatcgaaaattggccctacggtctacaatgaccgatgcacgtcaaaaccaccaagctatgatcgctcactcagcatctgtaggcagacgagctatataacgaaaggagtcttctcatgtcgtagacacaccgaaagtgatcagatgcagcaccacaatttatttccacatacctcatcgccctattcaaccgcttcgatcatcccgtctaacaagcatgtccgatcaaagtactatgagtggcgcatgttactgcagaaagatctgctatgacctatctcaagtggattcccagaccttggatggcgttgtctgtcactgcacggtgagttgggagcagaattcaatcacatcctaccgacgagttagacgccgaactctggggaatccgcagacgtgtcaaaagttgcacactatggtctcgtacaatgtcgctctcaaacgagaacagctaaagttggcaaaaggtgaacccaaggtaggtagactcgaccattgcatatcaatcctttgcttactcgctcgggttaccgtcagatgtacgaggatcttggtgccgacaacggtaaacgcatcttgcgatatttctgcggagattgtggttcgggattatactcgtacccggactcgatgcccgacacagttttcgtcaaagctgggtccatcaatgagctcgaccgagtcgttcctagagtcgaaatagtaggtgagacgagattgcattgagcgcaagatgtctgacgagtggtttccatgtcaatcacagtatgtcgagcgcgcgatcaacggcaccacacggtaagccaagacgagtgtccgaagcttgcatcgagcgagtgtctcacccccgtgaagatgtgcatgctataggggagccaaggaacgcaagactacattgttcgaagggatgaagaagaggcaaatcagctaggcccacgtcattgatcgcagggatctgctaccaaaatagcggcaagatactgctcaggaacgatagttcgaaacttccagccttttcgatcgaattcggtacagctcagccagactgcaatatcgagcaagcagtagagtattccctgtcgtcaccggctgctgttgtaaatgaatttccgtaacaatcctctacaccgtcacggcagtcacgattaagaccgtatgtataccaagaaatcggtctcgtaagtcctcaaaggtccttcaacaacttgaaattcagccgctatagcgagaaacccataatttacagatcaaatcgtcgatgtcttggatctttatgtcaggggctgagcgaatgaatatcaatcagcgtggagtctcggcaagtgcggaagacgaatttactgacaaggtctatcggcgatctgaagccgcaggccatcacacaactggtgcaagtcaaagctgtcgtcgaactgatttacgaaatgacgagtcagtatggttgtcgtcaatgaccataccggcgtgatggcactcactccacagaagccatgcagacgagcccaaagctctgcactcgtcaaggcgttcccgtcttctcctcgaacggcaactgtgacgtgtccttggccggtagagaccatgacaatcgtctggaagatgggacaggcgagatcgttgatgaagtcgaaatttcgatctctgataagccgaatgacgtcaaatgtagagggtgcgtcgatcgatactgtcggaggaatctcgggtatcataggcggcgtgtcttcgccatccctagatggcagtgtgagagcttgctggctttcagaagaaggatatgcctctagagtcagaggatactccatcggggttgataggacttcctggattatttgcgcagcctctgcgagtgaaatgttactggagacgcccggaagattccctgtaatgggtcgaggcgttgctgagggtggggtgtttttggcaatgttggggaccatcttgattccggtgccagggatttccgccggaatggggtgtgtatcgttggatatgagcgtctgtagtcggtcagactgaagaggaacttgactctccagctgagcttcgccgtagtcgtgtttgaggctgcccagcaggctcggatcgaaagctgtcgacccattcggcaggatgttcggttgggcgacctgggacgtgccgtttcccagtcccggcgcagccgggcttgctggccgacaattttttgtggtaaggtcattgatcgattgcgacccgctcagaatcagaagcagatcacgcaaccctgcgttttccctctcaagctcgtgaacacgctcgttcaacatccgatggttctgcagatgctgtcggaccgtttcttcgtatcccgttattctagcttgcaactgtcaggaggactagggaagtcagaccgccgggtcatctcgaggaagactatttgatgcctgctcacattcgctatcgtttggtcctttcgttgccggtgcaacatctgggcgattctgttttgatttcgccggcgaatgatcttgagttcttcagcatcatcgctggcggcctcgaccgtatcaccctgtgttcgacccatacgagcagacaatcggtcgcgccaggtggggatccaggcgagccgctaggtgcgagggcaagttgatcatgattctcctcgttgagttcgatttgaagctcaaaacgaaatgtcgaactgcatacaagggctccatttcagggtctcggacgatcccgatcaaaagcaagcttaaggcacatcctgtcgcgcggtcatcactcacgtaagcttgatttcgggacaatcctcgggaaattgtatgcaacatgctgacatgtctactcgatttactacgtttggcctacaagtggctacaatttagctcgctgagaagcttgttcttggtcatgtagttattcgatcttgacaccaatctttccaaagtgcttctggtcccactggtattggtaggcctccttgacctcgtccagggtgaacactttggaatcgaccacaggtttgatgttgttggcctcgatggcacggttcatctcctcgaactgctgcctgctgcccacatacacccccctgatgttgcaaatgttggtcaaggcctccaggactgaaggctgcttctctcccttgactcctcccaagaacccaatgacgctgatcacaccgtcaaagccgatggccttgagcgattggttcatagtgttaggtccaccgacctcgatgatgtgctggatccctcgaggaccagcgatctttttggcagtctctccccagttctcgtcctcgctgtacaggatgacgtgatcggcaccgagcgacttgacacggtcggccttggcctttgacgacgtggtagcgatgaccttggccccagcagctttggcaaactgaatgaaggtacggcagattgaagtgggtcagtcttgccatttcatcgtggtacgagcgagttcactggcacgtacttggatggcgaagatcgagacaccaccagtaccctgagtcaagacccagtcaccggggagcaatggcttgaggccgaacaaggagttccaggcggtcaaaccggcacaggtcaaagtggctccttcgacaaagtcgaggttgctgggcaaagcgacgagtccttcctcgttgaaggctccgtattgctgaagagccccgtcgatgacaccgccagttccggtggtgataatgtaagggtcgaccgatccagaaagatgggcctggttgaagagggtgacgaccttgtcaccagtcttgaatcggtggacctttgatccgacggcttcgacaaccccggcaccatccgacgcggggacgaccttgtctcgttgggggaaggggtattgaccctgagtaattgatacaacaagtcaatctggattagcacagcgggacgtctgctatattgtcaggttgatacacttaccttggcgatgaccaggtctcggtagttcaagctagctccatggactgtcatatggcacgatcgaaacgtaagctaacagaaacttcgcgatcctgtggaatcccgcgattgcactaacacttgacaaggacgtcatgatctccgagttcaggaatggcagcctccttgttgagagtcaaattgctgaaatctttggcaatgccctgaacggtccactgcttttggttctgaggagccatgtcgataggtattgaatgttcgtggtatgggcttcgagcgatgcgggggaatgctagcacaatttcgatagtgagaggcaagaagaattccagcttgacaaaatagtgatggagtactggatgaccctggattcatatactttctttgactgtgggacctggcggcaaggtcatggcacggtggaggtctgaccagcgcgaccagattagtaattaccgagcaaatgcctccgagcgttgaccacctgttttgtcatcaaacggccaagcatcacctgcctcattctccgcacgttcgacgagatgaaccattcagattcaagagctcacaggtttatgaaaccaatcgttagttccagtgaagagagaatctgctggaggattcctgttgcatacaagcacactctgtggctagatttcgggacgttggtgcgaaacgttccggccgcccaacgaaggtgcggagtggcttgacgagtccatcgaaacgaccgccgaggcgaggcgaagccttccttggtagctgcagtctctcaagctgtaacacctgggactcgatctcgcccatacgctagccatatcgtaatggacatcggcaagcatggggcgaaaatccagagacgaaagtagtgtgttcgagcagaatgctttactcaaggcgttcagatccgacgaggccgcagtcaagacaatgcttcgaggcgttcatcagtcgcatcggaacgcgcggtcatctttcattacgatcttcatcgatgacaaagtaagaggccatgccttgatccgtccatcctgcggtgaactcgactagaaatgtctttatcaattgagatgtggctttcaggcgagcaagaggaccagtagtagtgtctatacgttgagatcggctataaggacagcaaggttggtcgcgtgataacgtgcacatgagaatggcatcgttgccttcacagctcaaaatgaggtcattccttcccgatgctgaacgaagcccgtctattcgacctgcccggtgatatactcgtgccgctgacctgcaaatagccttcagctgctgttctcgagacgactcctcgcagcgctccggaatatcgaggccgacacgagacagatcgccgccacaggcggtcgagtttccagggtcccctgtttgtttttctggggcgagagcgtttgcgacttcatcaacaaacccgaggcttccatgtggcgttgtcccttcgtcgtcgcgccccggacagcctctggtgattcgcgccaaggtgggccagggcagccagaggaaggcgttttgtgaagcgagatcgatgccgtaagcacgcctgagagagctcggcgtcagagggagaggctggcttcgggcagcaaccgttaagttaatcgattgagatcaagcaattgcaactgccaattgtgtcctgatgtttgatcctgattttacctgaaccgatagccaacgaaaacgattgcgaccgtcgaccaccggattgtatcctttgacgagtctcgcattctagaaaatacccctcactcgcttgtcacgaatatactttacgacctacgctggaggaaagaagaactttgccctttcccatcaaacacacgggcacacggacccttctgacagctcgagacatcctttgagctattggccttccttttcccttgaaccctactttccccttgatcgagctcgcgtgtgatcagagtttcatctctcttcacatccgtcgtcctctgatcattccctcgtctcctgcctcgggagcgacacaaactctatcaacatcaacaaacgaaagacctttggccatcaaagagcacgactaccatcatcattatcgtctacatcgccctatccgtcgtccacctaccgcgcgacgcacctagataggcaaaagttgatacttcatcaacgatcaacaactcgtatcgatcgaggacatcgaggctagaggcgatactcttgtatcacccactcggactcgttcgaatctcatacgcctctctcaaactacgacgtcttcacgtacacctcgacgccactacaagcccgaacgggagactcgtaggacctttcaccgctcagccgtcgctgctgcaacgaagaagcgagatcaggaggagacatttgaaagcgtcgtctgacgttgacccaacgaacctcgtgagttgactgactgtaaacacaatcggccatctgccttgtttgatgaggcaggctgaccgataacctcttcctttgatctgggatccttctatcagatcgttctgagcaggactctttcccacgcacctaccgtttcgctctcctacgccattgtcaaggcatcaacagatcatacaagcaagacaacttcgtctttcgtctagtcgaggccacattatcgcctcggacgtacaacaacactctttccccttccgatataccccatcacctggtcttcctgaagaggagtccgtccgttcatttccccatccgacttttcctgggatcaccatttttccgtctttcaacctgggatcccctcagactgtttcaaagaatcaaaaaccaaaacacgccagctccccgttcaacgacacgaccatggtcgctcgtgatgcttccaccgcatcgacgcgattcgctctcgtcagcctgaggacgttttctctcgccgtcctcctcctcgctctagtttcctctcaggtgatccctgccgcgtcggcgtatcaactgcctggaaatctgcatcaacctgccgaagtacccgaaggccatatccgagggtacggccactccctcgggcatggcttgatcgggaggaagcatggatccgcggacaagaggatgatgagacgggttcgaagcaaggggaaatcttggtcggaaaaggttgccagggatgaggatgaagaggcggatttcggcctggtaaagaagggggacaaggcatccgtccttgaggtcgaaaagagggacgagagctcggatctagccggtgagtcacgacttgaccctgagtgcaaagtatgatcccgctaatgatgacacacgtccacgaattgtaggttttgcagagggattattgaacgctggcttggcggtcaacgtctccctcggtgaaacttcctccaccgtccccgaatcgacgtcccctctcgacgggtttacccccacggatcccactgccgcagagcccacatcgatcacgcaggaacagccatccgctacggccgagaccacgtcggtcacctcgcaaactgatccggtaccttcggagaccgccacgcagacgcaagaggcggccgacactatgttgaccgatgccgcggctcctaccacgagtgaccccggtagtaccagttccgctactcctgttgtggagtctgactcattcacgcctgaagccgaggcgaccagtacggtccagcaggaagccgcgtcatctgctgatggtgctccatcatcggaagttgtcgatagcaccattacagaagctatgcctactacagctcaggatgtcgcgcctactatcacggccgatgtggctcccacctcaactctagacgccgcttccaccaccaccaccaccttgcaggagtcggtgtcccaggtcaccaacgaggttgtcccgcagagtcaggcttcggcgacggtggatcctgcctcgagcgacactgtccctagcgaggcccccgcgacggacgttgtgtcagattccatcccgatcactaccgcaaccgacaatgctgctcaacctactactcaggagcttcaacccaccgagcagccggcgaccaccgagacaacaatcgctcaaccagacgcgactagcacagtcgagtctgtccctgaagcgccatctgcatcggaaactgctcctgtcccgtcgcagacgcaagaaggtatgggcgaaccagcaggaacttctacagcggtggttccgaccggcgaacagccttccgccaacccctcaggatctatcatcgagccgatcgctactcagacttcgacgtccacacaggagcaagccggtgtcacaactacaggttagtctcgaataaattttccgtctctttttctgtttgcgtcccgtctctctggatcttgccttgcctcgcctccatctcggctccgtattccgtctcgtgtttcttttctactcctgccttgccattcttctcgttactcttgctagcgacaagctcaagacgctcagattttgcattgcctttgatcacatgactctcttctttcgacgcgaaaaccgtctttctgcttggctcgttgcgcacaagtagctgaaggtagtcagtccgggacttccacggtcgaagggcttccacttgccgagacactggtcgaaagcaacactggcacgggaactttaggcacgatagcgattggaagcttgtcctctgctacaacagcggcatccgagcaactggcaaattctactggacccacgctcagcgtgaccagacataccaccgacggcttgccacaagttccgactcagactacagtggatacatctacactcgctgtaaattcggataccactacagctacgactggaagtgtatccgtcccaacggtcccaacgaccagtcttgcgacatctttcgcccagaccattacaacggcgtccgatacgcttgcaaaggcaacgtcagtgacagatcccaaccacacagatacttctgtgcttccgaacagcacagtagctgctgaaaacaccgatgccatgaaaaccacgcatactgtcgaaagcacgggaacacgcgagcacacaagtactattctgggcactggtacggtcgggcactcaagcgataagcaatccaatgccacggatcaagcagtttcgacgcaaacatcacgcatctcgactatcagtgtaccttctgcagcgtctatgactggacaagttccacagccgagaccgagtacgacctcgacgatacagcctgccgaatctgtcacgaccgcaagggaaccttccattaacgcgacttccctgaatatcacagaagctcagagccaggtcgtacagtcgagcatgaccgaagtcgaggacgcaacaagtacaatcccagtccctattgttgcaccgtctaccagttctgttgcggcggaggtgacggctacgcagctgacggcaggtgggtcttacgcgagttgtttcatcacccgactcatctattgaaggctgaaatacatatcttgctacgtatcagaagcacctgctgcttcagcgactactactgtagaggagatcgtcccaggtgtttcgcaaggcggtccttcacaagaaggtgactccacgatcagcggtatgttctcgacagttgtcaatacggccactctgttctgaacaggatgcgtgtgttgcagcgttgcccacctccagtggcattgattcgaacggtgatacctcggccatcacctctgctgtcgctgatgcgaccaacaccgccgagcctgctggcagttctaactccggtcctaccacatcgaccgtgatgcctgtttctgatccagctcctacctcgaccggcccgggaccagagtcatctgctactcagaatccttccgtgcagcccaccgccactacgcaggacgttgctagcagctccgcaccgtcagaaatcgtctcctccacaacaagcgatgttgtagggcagacctcacaggcaggaaatccgacgactacacagcccactgttggcgttttccccaccacctccacggtgctatcaagcggcagcgatgctacccagacggaagtgcaagcaacatctaccgttattggcacttcttccttcgggcctgttgtgccaacgtcggcacagcaaagcgtcactagcgttactcagcctgaatcgacttcgggagcttcctttggaccggtcaccagctccgccgccccaacgaatgaagatacatctagcggccttcccagtagtgctgctacctccacgagcccatctcaagccattcccacggccgaagcaacctctgatgcactgtccgagactagagccgagcccactggtacacttggctcatctagccaaccggcttctgggactgccgcttcgaccggggatggcgagacgactcctcgacctaccggaacggaaacgttgactactcagagcctagctaccgagagcagtacttcccctattagtggcgcttccgaggccacgactcagtcagactcttggtctagctgggcctcgtcgcagtcgaccggcaccgaaccgtccagctctttcgagccttacgtacccacagctacgactttaatctttgcggctccaacctccacgggttcgactgcgagtctcactgagagtgcttccctttcccaaaccacggagcagagcctcacgatcactccggaaacgacgctagtcatgccttcaacggcggtcatcgcttcgaatgtgccaacaatgattgtaccgccaagcgagccaaccactacggcaaaggcggcgagtgagactgcctcggtttccaaggatggctcgcaaactaccgcagggtccgccttgatcagcattcttctgaactcgaataattacccatggcaatttgtcgtaagtggaaggcgccgctttccatccgctagccctttaagctgatgctttcacgggctctcaggtgaacaattcagacgccacaagccaattattcgtgaccttcccagaaatgctctcgacagccctcgcgatcgactgtacgtgattttgcttgcatcgtcaggcagtcgcaaggagctgactagttttcccgtcacctcttgcagcgaaagaagtgcgaacttatgcgcttcaggcctattctcctgccagctacaacggggacagtacagaactgcttaccaagtggctgggttatatccctgccgatcgggtgaatgatctcgctcaatacatcaagacgcctagcagtccgctgtataaccaagcgggaatcccgggccagctcgccttgcaaatcgactcttcttacccgttggtaggatcaaccaacacgggcagcaatgggtcgccgacctccgctgcaagcgtttccaagaccgacaacacgcgaagagatacgatcatcggtgtctgtgtgggtgtcggcggtgctctttggctagcccttgcgatatggatataccgtcgagtcaagcgcaaccatgacgccaagatccatcgtcgtctgtcagagcggttctcagtgaacgagggagccgcgttcgccgggagctaccctgcaaactcgaggcattcgaggtccagcagcttggccgccagcgaggtggacgatcgtccatcgtccttttacgcaaacgatgccgacaatttccccgccgctaggcgtagacgctcgagcgtctcgcaagcagtcagggatagcgtcgctttcgggaacccatctcagagacctccgagcggtatcggatcctcctggttccgctcgagtggaagtcaatctaatcgacggatctcgcgcgactttggtgcgaacaatccggcgtcgcctcaaatgtcgcagaatcccttcgccgatattgtccatcgctcgtatctggaggacggaccagctccgcgatcggctgcttggcgggcttccacgaacggtcgtcccgttgacaagcggttgattggcgcgccgacgttgcagtcgaattcgctggagtttacgggatacaacgaacgacaataggaatcttgaaatgacgctgcgatcggaccgactcttgggattatcttaatacttagttacggacaattcacttctgacccctcatcctcttatccgtagtacctacctacacccttacgggtgtcgcttcatgtaaccgacgtcctggcgacgacgtgaccgcatgttcatggtgattatcctgggaaattgctacttgagagattcataacgaatgagggatatctcgagcatttgggggctgcgaggacaaatgcattgcctcaaattgaaccttttctccacatcattttgatcgtgaatcgttaagcgtcaattcgcggaagcaaactgatggacctagatgtggtcgaccgaggcagccgttacgactacatcttgttgcacctctattcatccagtaaaaacaacagctcttcgatctcgaccaacaatcatcaaacacaataggtattctttgcgatgtctgagatagatgagatcaacaagacccgtatagcggccggtctcaagccgattcccgtccccggctcatcagctgctgacaatgggagtggcgaggatggcatgcaggtcgacgaagatcctgatgtcgttgctcagaggaactaccaggagaggatggagcaggataaaagggaaagagagacaaagtgggtctgctctatttgataggagaagagcttgatatgatcagagctgacgttaccatctcacagggaaatccaggagcgcatagccaagtaagtgttggcagttctatgattcggtttattatcagacctgacaatgcgttcttttgcctttttgcagggccaagaaccaaagagcccttaaggccaaactcaagggttccacactgggcgaggaagatccatctgcttcctcttctgatcaatccacccttgcttggttgaaagcgtccaagaggaagcagaagcagatcgccgctcagcttgcccaagccaaggcgagagaggaggaagagaaagagcgcgagctgcaagcggtctacggcgccaatgacctgcgaggaatgaaggttgcccacaggaccaaagatctcgacaaggctggaggggagatgattttgacgctcaaggactctaggatcttgaacgacgaagaggatgagctgcagaacgtcgacctggcggacgaagacagaaggcgagcgggtgaggtcaggaagaagagggccaaggagggctatacgggatatgatgacgacgagttcggcgctgggtcggatgaggatctggctggggtcggaaggaacgtcctgaccaaatacgacgacgattacgaaggcgaaggtctgaaacgtgaaggatttcgtctagggggagctacccctcctccaactgaaagcaagaagcgaaaggcagaagacagcgggccaagcaatccagctggtggcagtatggggatcatcgatgatgacgatattcctcacagcgccgaaaccaccgcaaacaaggtcaacaggcagttattgaacttggattataccagtaagttgacgaaatgctctttgagcccttgaatctcgctaatctgctgattattgcagaaaacttcgatgtttcggattacgctacggaagacaccaccttcaagaagaagaagaaaaaggccaagcgaaacatccggcgagccgacgtcggacaggaagacgaggcgaatcctgaaggcggagaggtccagatgactacgctgaacagagaggttgacgataatctcgttgatgacgaagatctgcaattcgctttgagcagacagaggaagcagagcatgatgaagcgtggcaaacgtatgagggtggacgatctcgtcgcacaggtcaacgagacgagagaagccagtgaacaggctatcgacgatgccgcgggcatcaagcttgaatctggcgtcaaggatgaggaagatggagggctgacctttgacgatacgaccgagttcatccgcaacgttacgctcgattcgctcgtcaagagggaacctgtcgctcgtcctctcgctacctcctcgtcgtctgcggcgcccggtgcggcgatacagttgcccgatggcgtcacggtcaagcaggagcccggcgaggagccggcgcaaattcgggtcaagattgagacgacggacgacgatcaaccgcttggtgggttggacgtcactcagcaagacgacgtcaacatggaagatggcgagctgagcgaagaggatgaggagttggctgagatggcactgaggcagggactcagtatcgaggagatgaggttgaagatggatgctgagttgagcgtcaagaaggaaaacactgatgaagtgagcaccgaacacttcgtcgcgactttctttaccagtcgctgatctcctttcttgccactttttgaaggtcatggtctcgaagccagagcccaccgttgctggcggagttgccggtgctctcgcgttactgcgccagcagggagctctgaaggaaacaacgagtgaaagcaaggagcgtgaacatttgcagaaagagcgtgatctctggttggcagatcatcgtcgacgaattgccaaaagggagctcgaaaaggccaaactgcgtgggggcgccgtacgggaccaagcccagcgcgagtgggagatcaagaccagggagcagcaagaagcccgggatgctttgcaagcatatgcaacctacaaaccggacatcaagattgaatacacggacgagtttggtcgaggtgagtcatactagcgagagaagagacggcggaaacagttcgttaaaagaaagtatgttttcgcagttatgaccccgcttgaagcatggaagtcgctgtcgcacaagttccagtaagtggccgagattcgttcatcgcctgtcttgatctacgagtagctcacgcgtgtgcatatgtacgttcacagcggtaaaacatctggacgaaagaagacagagttgcgtctccgacgagtcgaagaggagcgcaagcgagaggcaatggtcgctggcgacacaccttcgggaatgctgcaagcgtttgcgaggagacaagaggccacaggggaggcatacatgaccttgtctgtcggaaaccgaaagtaagcaatccccatccacctctgaatataggaagaccgaagctgacagcgactcgccaccttctctcagctatgtaccgaccggcgacgtcaagaccaagcatgggatcgtcactcctggaggtaagagcaatgtcagtggatcgaataaggcatcgggaaagaagggtggtccgtctggacccaaggttctcggttagatggcctggcactggttctagcaggcagattcttattcgctacatgtataccgctgtcgaaattaaggctcgaaggccacggcaaaaaatcgctaccaaccccgccgcgatccttgatatacagctttgcgcctttcactcggtaacattgagcctgagtgggctgtgctgccagtttctccagcgtcgagtgaaaagccaaccatgatataatgcccagtatatacaactcgtgccgataaacacgcaagaccatccatcggactggctccgtgaaaaacatcacggacgagccgcccgcatcaacccctccatctagaaacgaaagatgatctgacgcctacttgccaaagtcggggaaacattcggcgaacgtgaaacccttgtgcttgaccgagtgctcggtcagtctgagaacgtcacaaagaatgaagggtcagggtgctgtccaattgtgaagtgccgggtctgttcgaagatacatactttgcctctccggaagtggactggaaagtctggaaacaccgcttgcagatggtagtctgggcagcctgccgagcgagaccgaaggggacaaggtcagtctgggcttcctctcgacatacatctcaagtcctggagagactcacagcgttggtcttgttttgagaagaagctcccttgggtgcgtccttggcgttacgctcccgcttttgttgagctttggcaccctattgtcgagacaagtccagaaggaaaacgatcagcgatctcgccccaaagtgaccgaaccagcacactcacgttacccattgttcaagatagatcaggtcaagtttacagagtatgagaggtcgtcgttgtgaaagctctatcgtttagcgagaaaaggctttgtaagagaattggcaggtcgagacaaggagaagaagacttttccttcagtcgatctgcaggaaagttgccttatttattgactttgtgattgatgcgtgctagcctgccatgaccgggaattttcgacggcgtggggaaccgcggagtcgaatggcgagatgtaacgaacgcttcattaggtaagccagaaaagtcacgaacattttattggttcggttgatcgttttccaggtgttatatcgctgtcgacccgaagaacgtcaccgacaacgtaatgggagagtggtaacttgggcgattaccgtttgtaccattacgcctcaccaaccagccctgctggtcaacggttcgactccgataatcgtcaagattttcggcaccggggttgttgcattatgtgaggtacgactcgcgcgggtcgtactcaggagtctgagccggtcgtgctatcttacctggggacagcgtacgcgcgccacagggcccattgcgggttgatgagtgacggaggcaggatcacataaaaatccttcgcatcatgtgatgcaacacccgttcaacaatcaccatcacgcctgatgtaatgtcagagtgagaaatgcccttttttttttttttggtttttttgttttgttttgtttgcttctatcgtgctactatatatcatgtcaatgatcacacagcgcacacgattcgcagtggcagggtcatgaggaacaatttcgtcggtgttcacattgactcttaatatcatcataactggctgtatcagagctactatcgtgcaatctacgacctatctctttcaagtttctgcctctcctcttcgatagcgttttcgccgtccttcttctcgtcgaatcggtacatcggcagatcgagcaaaacccacgtcttgaaccacctaggcaagggcttgtacagggcaggcgggatcgggatcaagagcgaagtttgatcgagataacccttgtagtgtctccaggtagatccgccatcgctttctcggtcaggatcaggcgagtatgattgaaggtaaaacttcttcgcagtgggcttctcagcagttggtactcccgaagcgaaaagcagcctatcggaagggagcgttagattggggaaaacaaatggcagcatgcaacgtatgagagagtttgtgactcacagtagggtcgtgaagatcggccctaccacagctccgtattgggcgctctttgcgcctccgtctacacgtccgttggtagatggcgatactgatcatttgccagcaactaagcgtcagcgaggacgaagaaccgaagttctggcgatcgcattggcagacttacgagtcagaatccagataccccactgcaagatgatctcgccgaaatagggaggatgcctggaccacgaccagacctgagcagtgcacggtcggttcttaggtggatgttggctcttgtaccaaaactgcaatgatgccccccgtcgttagcgataggccaggtttgcgaatgaggtcgaacgatactgaccttggcgatgtctgcccagctttctacaatgaagccgagagcccacaagatgatcccggcgatgtcccttccggtaccgaacgaagggttatctcctccacgggagaaatccgagacggcaggagagttcaagatcaccaccggcaaggctacgcag
